(19) United States
(12) Patent Application Publication
(10) Pub. No.: US 2022/0401438 A1
(43) Pub. Date: Dec. 22, 2022

(54) CANCER THERAPEUTIC METHODS

(71) Applicant: University Health Network, Toronto (CA)

(72) Inventors: Anthony Michael JOSHUA, Toronto (CA); Marianne KORITZINSKY, Toronto (CA); Sue LI, Toronto (CA); Stefano MARASTONI, Toronto (CA); Bradley G. WOUTERS, Toronto (CA)

(21) Appl. No.: 17/727,394

(22) Filed: Apr. 22, 2022

(30) Foreign Application Priority Data
Apr. 22, 2021 (AU) 2021202471
Apr. 22, 2021 (CA) 3116081

(51) Int. Cl. A61K 31/496; A61K 31/4706; A61K 31/138; A61P 35/00

(52) U.S. Cl. CPC A61K 31/496; A61K 31/4706; A61K 31/138; A61P 35/00

(57) ABSTRACT

Described herein are methods and compositions for screening cancer cells for sensitivity to itraconazole and use of itraconazole in treatment of cancer.

### PRIORITY CLAIM

[0001] This application claims benefit of priority to Canadian Patent Application Serial No. 3,116,081, filed Apr. 22, 2021 and Australian Patent Application No. 2021202471, filed Apr. 22, 2021, the entire contents of which are hereby incorporated by reference.

### SEQUENCE LISTING

[0002] Pursuant to 37 C.F.R. 1.821(c), a sequence listing is submitted herewith as an ASCII compliant text file named “SWIP.P0004US.txt”, created on Apr. 22, 2022 and having a size of ˜6 kilobytes. The content of the aforementioned file is hereby incorporated by reference in its entirety.

### FIELD OF THE INVENTION

[0003] The invention relates to cancer, including but not limited to ovarian cancer and to itraconazole and therapeutic uses of same.

### BACKGROUND OF THE INVENTION

[0004] Epithelial ovarian cancer (EOC) is the most lethal gynecologic malignancy in developed countries¹. It can be divided into five subtypes—high and low grade serous, endometrioid, clear cell and mucinous carcinomas². Treatment for advanced EOC is multi-modal integrating surgery and platinum-based chemotherapy, which are tailored according to histological subtype, stage and patient characteristics. Contemporary systemic treatments in recurrent EOC include chemotherapy, anti-angiogenic agents and poly(ADP-ribose) polymerase (PARP) inhibitors³. Platinum resistant EOC—defined as disease progression occurring in <6 months from last dose of platinum—remains an aggressive disease with limited effective treatment options and response to chemotherapy (approximately 10-15%)^{3,4}.

[0005] An emerging strategy to expand the therapeutic armamentarium against ovarian cancer is drug repurposing. A widely used antifungal drug, Itraconazole (Itra) has been investigated in several cancer types⁵⁻⁷. Current understanding of the mechanism of action of Itra in cancer include: i) reversing chemoresistance mediated by P-glycoprotein;⁸ ii) potent anti-angiogenic and anti-lymphangiogenic activity;⁹⁻¹¹ iii) modulating Hedgehog (Hh) and Wnt/ß catenin signaling;¹²⁻¹⁵ iv) inhibiting the mitochondrial protein voltage-dependent anion channel 1 (VDAC1);¹⁶ and v) altering cholesterol trafficking by direct binding and inhibition of the lysosomal protein and cholesterol transporter Niemann-Pick disease, type C1 (NPC1)¹⁷. These latter two effects have been demonstrated to result in inhibition of the mTOR (mammalian target of rapamycin) pathway¹⁸. A number of preclinical and clinical studies have suggested that patients with prostate, lung, and basal cell carcinoma may benefit from treatment with Itra monotherapy or in combination with chemotherapy^{5-7,19-21}. In platinum resistant EOC, two retrospective studies in patients with recurrent ovarian cancer have demonstrated the beneficial effects of Itra in combination with taxane-based chemotherapy^{22,23}.

[0006] Investigations to date have revealed that itraconazole has varying efficacy for treatment of cancer from individual to individual^{5-7,19-23}.

[0007] To the inventor's knowledge, presently there is no method for enabling one to identify an individual in which itraconazole is likely to have some efficacy for treatment of cancer, especially ovarian cancer, nor to identify an individual in which intraconazole is likely to have limited or no efficacy for treatment of cancer, especially ovarian cancer.

[0008] There is a need for methods and compositions for providing improvements in the treatment of cancer, especially ovarian cancer.

[0009] There is a need for methods and compositions for providing improvements in the use of itraconazole to treat cancer, especially ovarian cancer.

[0010] There is a need for methods and compositions for providing improvements in identifying individuals in which itraconazole is likely to have at least some efficacy for the treatment of cancer, especially for the treatment of ovarian cancer.

### SUMMARY OF THE INVENTION

[0011] The invention relates to methods of treating, preventing, or ameliorating cancer, especially ovarian cancer, or conditions associated with, or arising from same, and to pharmaceutical compositions and kits comprising itraconazole for use in an individual for treating or preventing cancer, especially ovarian cancer or conditions associated with, or arising from same.

[0012] The invention provides a method for preventing or treating cancer or a condition associated with same in an individual comprising providing a therapeutically effective amount of itraconazole in an individual, wherein the individual has a cancer cell having a mutation, preferably a loss of function mutation in a gene selected from the group consisting of: NBEAL1, C18orf8, COG6, SLC30A9, ARL1, UNC50, EPT1, RTN4IP1, SPTLC2, SEC14L1, CCDC22, SPTSSA, KIAA1033, SPTLC1, VPS54, TSSC1, KIF11, NDUFS4, COMMD4, COL4A3BP, VPS51, VPS52 and VPS53, or wherein the individual has a cancer cell having a reduced production or no production of a protein or RNA encoded by a gene selected from said group.

[0013] The invention further provides a composition comprising a therapeutically effective amount of itraconazole for use in preventing or treating cancer or a condition associated with same in an individual, wherein the individual has a cancer cell having a mutation, preferably a loss of function mutation in a gene selected from the group consisting of: NBEAL1, C18orf8, COG6, SLC30A9, ARL1, UNC50, EPT1, RTN4IP1, SPTLC2, SEC14L1, CCDC22, SPTSSA, KIAA1033, SPTLC1, VPS54, TSSC1, KIF11, NDUFS4, COMMD4, COL4A3BP, VPS51, VPS52 and VPS53, or wherein the individual has a cancer cell having a reduced production or no production of a protein or RNA encoded by a gene selected from said group.

[0014] The invention further provides a use of a composition comprising itraconazole in the manufacture of a medicament for preventing or treating cancer or a condition associated with same in an individual, wherein the individual has a cancer cell having a mutation, preferably a loss of function mutation in a gene selected from the group consisting of: NBEAL1, C18orf8, COG6, SLC30A9, ARL1, UNC50, EPT1, RTN4IP1, SPTLC2, SEC14L1, CCDC22, SPTSSA, KIAA1033, SPTLC1, VPS54, TSSC1, KIF11, NDUFS4, COMMD4, COL4A3BP, VPS51, VPS52 and VPS53, or wherein the individual has a cancer cell having a reduced production or no production of a protein or RNA encoded by a gene selected from said group.

[0015] The invention further provides itraconazole when used for preventing or treating cancer or a condition associated with same in an individual, wherein the individual has a cancer cell having a mutation, preferably a loss of function mutation in a gene selected from the group consisting of: NBEAL1, C18orf8, COG6, SLC30A9, ARL1, UNC50, EPT1, RTN4IP1, SPTLC2, SEC14L1, CCDC22, SPTSSA, KIAA1033, SPTLC1, VPS54, TSSC1, KIF11, NDUFS4, COMMD4, COL4A3BP, VPS51, VPS52 and VPS53, or wherein the individual has a cancer cell having a reduced production or no production of a protein or RNA encoded by a gene selected from said group.

[0016] The invention further provides a method for preventing or treating cancer or condition associated with same in an individual comprising:
[0017] assessing or having assessed, a sample comprising a cell, preferably a cancer cell obtained from an individual for whom cancer is to be prevented or treated to determine if a cell in the sample has a mutation, preferably a loss of function mutation in a gene selected from the group consisting of: NBEAL1, C18orf8, COG6, SLC30A9, ARL1, UNC50, EPT1, RTN4IP1, SPTLC2, SEC14L1, CCDC22, SPTSSA, KIAA1033, SPTLC1, VPS54, TSSC1, KIF11, NDUFS4, COMMD4, COL4A3BP, VPS51, VPS52 and VPS53; and
[0018] where the individual has a cell having a mutation, preferably a loss of function mutation in a gene selected from the group consisting of: NBEAL1, Cl 8orf8, COG6, SLC30A9, ARL1, UNC50, EPT1, RTN4IP1, SPTLC2, SEC14L1, CCDC22, SPTSSA, KIAA1033, SPTLC1, VPS54, TSSC1, KIF11, NDUFS4, COMMD4, COL4A3BP, VPS51, VPS52 and VPS53,
   [0019] providing itraconazole to the individual,
      thereby preventing or treating cancer or condition associated with same in the individual.

[0020] The invention further provides a method for determining the likelihood of an individual presenting an anti-cancer response to administration of itraconazole comprising:
[0021] assessing or having assessed, a sample, preferably a sample of cancer cells obtained from an individual for whom the likelihood of presenting an anti-cancer response to administration of itraconazole is to be determined to determine whether a cancer cell in the sample has a mutation, preferably a loss of function mutation in a gene selected from the group consisting of: NBEAL1, C18orf8, COG6, SLC30A9, ARL1, UNC50, EPT1, RTN4IP1, SPTLC2, SEC14L1, CCDC22, SPTSSA, KIAA1033, SPTLC1, VPS54, TSSC1, KIF11, NDUFS4, COMMD4, COL4A3BP, VPS51, VPS52 and VPS53;
[0022] determining that the individual has a higher likelihood of presenting an anti-cancer response to administration of itraconazole where a cancer cell in the sample has a mutation, preferably a loss of function mutation in a gene selected from the group consisting of: NBEAL1, Cl 8orf8, COG6, SLC30A9, ARL1, UNC50, EPT1, RTN4IP1, SPTLC2, SEC14L1, CCDC22, SPTSSA, KIAA1033, SPTLC1, VPS54, TSSC1, KIF11, NDUFS4, COMMD4, COL4A3BP, VPS51, VPS52 and VPS53;
[0023] determining that the individual has a lower likelihood of presenting an anti-cancer response to administration of itraconazole where a cancer cell in the sample does not have a mutation, preferably a loss of function mutation in a gene selected from the group consisting of: NBEAL1, C18orf8, COG6, SLC30A9, ARL1, UNC50, EPT1, RTN4IP1, SPTLC2, SEC14L1, CCDC22, SPTSSA, KIAA1033, SPTLC1, VPS54, TSSC1, KIF11, NDUFS4, COMMD4, COL4A3BP, VPS51, VPS52 and VPS53;
   thereby determining the likelihood of an individual presenting an anti-cancer response to administration of itraconazole.

[0024] The invention further provides a method for selecting an individual for treatment of cancer with itraconazole comprising the step of:
[0025] assessing or having assessed a cell of the individual, preferably a cancer cell to determine if the cell has a mutation, preferably a loss of function mutation in a gene selected from the group consisting of: NBEAL1, Cl 8orf8, COG6, SLC30A9, ARL1, UNC50, EPT1, RTN4IP1, SPTLC2, SEC14L1, CCDC22, SPTSSA, KIAA1033, SPTLC1, VPS54, TSSC1, KIF11, NDUFS4, COMMD4, COL4A3BP, VPS51, VPS52 and VPS53;
[0026] selecting the individual for treatment of cancer with itraconazole where the individual has a mutation, preferably a loss of function mutation in a gene selected from the group consisting of: NBEAL1, Cl 8orf8, COG6, SLC30A9, ARL1, UNC50, EPT1, RTN4IP1, SPTLC2, SEC14L1, CCDC22, SPTSSA, KIAA1033, SPTLC1, VPS54, TSSC1, KIF11, NDUFS4, COMMD4, COL4A3BP, VPS51, VPS52 and VPS53;
   thereby selecting an individual for treatment of cancer with itraconazole.

[0027] The invention further provides a method for administration of itraconazole to an individual requiring therapy for cancer comprising the step of:
[0028] assessing or having assessed a cell of the individual, preferably a cancer cell to determine if the cell has a mutation, preferably a loss of function mutation in a gene selected from the group consisting of: NBEAL1, Cl 8orf8, COG6, SLC30A9, ARL1, UNC50, EPT1, RTN4IP1, SPTLC2, SEC14L1, CCDC22, SPTSSA, KIAA1033, SPTLC1, VPS54, TSSC1, KIF11, NDUFS4, COMMD4, COL4A3BP, VPS51, VPS52 and VPS53;
   optionally
[0029] administering a therapeutically effective amount of itraconazole to the individual for therapy of cancer.

[0030] The invention further provides a method for treatment or prevention of cancer comprising providing in an individual requiring said treatment
[0031] itraconazole
[0032] a lysosomotropic compound, preferably selected from the group consisting of chloroquine, azithromycin, dririthromycin, clarithromycin, erithromycin, promethazine, cyclizine, amodiaquine, telithromycin, tripelennamine, clemastine fumarate, hydroxyzine, rifabutin, mefloquine, chlorcyclyzine, homochlorcyclzine, quinacrine, meclizine, tilorone, bepotastine besilate, vicriviroc, hydroxychloroquine, quinine, arbidol, nelfinavir and tamoxifen,

[0033] preferably wherein the itraconazole and lyosomotropic compound are provided in the individual in synergistically effective amounts;

[0034] preferably wherein the cancer of the individual has a mutation, preferably a loss of function mutation in a gene selected from the group consisting of NBEAL1, Cl 8orf8, COG6, SLC30A9, ARL1, UNC50, EPT1, RTN4IP1, SPTLC2, SEC14L1, CCDC22, SPTSSA, KIAA1033, SPTLC1, VPS54, TSSC1, KIF11, NDUFS4, COMMD4, COL4A3BP, VPS51, VPS52 and VPS53.

[0035] The above described methods may comprise the step of determining whether the cell of the individual has reduced production, or no production of a protein or RNA encoded by a gene selected from the group consisting of: NBEAL1; Cl 8orf8, COG6, SLC30A9, ARL1, UNC50, EPT1, RTN4IP1, SPTLC2, SEC14L1, CCDC22, SPTSSA, KIAA1033, SPTLC1, VPS54, TSSC1, KIF11, NDUFS4, COMMD4, COL4A3BP, VPS51, VPS52 and VPS53, wherein reduced production or no production of a protein or RNA encoded by a gene selected from said group determines that the cell has a loss of function mutation in the gene, thereby determining whether the cell has a loss of function mutation in a gene of said group.

[0036] The invention further provides a kit comprising:
[0037] a probe for assessing for presence or absence of a mutation, preferably a loss of function mutation in a gene selected from the group consisting of NBEAL1, C18orf8, COG6, SLC30A9, ARL1, UNC50, EPT1, RTN4IP1, SPTLC2, SEC14L1, CCDC22, SPTSSA, KIAA1033, SPTLC1, VPS54, TSSC1, KIF11, NDUFS4, COMMD4, COL4A3BP, VPS51, VPS52 and VPS53; or
[0038] a probe for assessing for reduced production or no production of a protein or RNA encoded by a gene selected from said group;
[0039] written instructions for use of the kit in an enumerated embodiment described below.

[0040] Various (enumerated) embodiments of the present invention are described herein. It will be recognized that features specified in each embodiment may be combined with other specified features to provide further embodiments of the present disclosure.

[0041] Embodiment 1: A method for preventing or treating cancer, preferably ovarian cancer, more preferably platinum resistant or refractory epithelilal ovarian cancer in an individual, comprising
[0042] administering a therapeutically effective amount of itraconazole to the individual wherein a cancer cell of the individual has a mutation, preferably a loss of function mutation in NBEAL1 (SEQ ID No:1); more preferably a loss of function mutation in NBEAL1 (SEQ ID No:1) and a mutation in a gene selected from the group consisting of C18orf8 (SEQ ID No:2), COG6 (SEQ ID No:3), SLC30A9 (SEQ ID No:4), ARL1 (SEQ ID No:5), UNC50 (SEQ ID No:6), EPT1 (SEQ ID No:7), RTN4IP1 (SEQ ID No:8), SPTLC2 (SEQ ID No:9), SEC14L1 (SEQ ID No:10), CCDC22 (SEQ ID No:11), SPTSSA (SEQ ID No:12), KIAA1033 (SEQ ID No:13), SPTLC1 (SEQ ID No:14), VPS54 (SEQ ID No:15), TSSC1 (SEQ ID No:16), KIF11 (SEQ ID No:17), NDUFS4 (SEQ ID No:18), COMMD4 (SEQ ID No:19), COL4A3BP (SEQ ID No:20), VPS51 (SEQ ID No:21), VPS52 (SEQ ID No:22) and VPS53 (SEQ ID No:23), more preferably a loss of function mutation in NBEAL1 (SEQ ID No:1) and a mutation in a gene selected from the group consisting of C18orf8 and VPS54,
[0043] optionally comprising the further step of providing in the individual a lysosomotropic compound, preferably chloroquine, azithromycin, dririthromycin, clarithromycin, erithromycin, promethazine, cyclizine, amodiaquine, telithromycin, tripelennamine, clemastine fumarate, hydroxyzine, rifabutin, mefloquine, chlorcyclyzine, homochlorcyclzine, quinacrine, meclizine, tilorone, bepotastine besilate, vicriviroc, hydroxychloroquine, quinine, arbidol, nelfinavir or tamoxifen, wherein the lysosomotropic compound and itraconazole are provided in synergistically effective amounts.

[0044] Embodiment 2: A method for preventing or treating cancer, preferably ovarian cancer, more preferably platinum resistant or refractory epithelilal ovarian cancer in an individual, comprising
[0045] administering a therapeutically effective amount of itraconazole to the individual wherein a cancer cell of the individual has a mutation, preferably a loss of function mutation in C18orf8 (SEQ ID No:2); more preferably a loss of function mutation in C18orf8 (SEQ ID No:2) and a mutation in a gene selected from the group consisting of NBEAL1 (SEQ ID No:1), COG6 (SEQ ID No:3), SLC30A9 (SEQ ID No:4), ARL1 (SEQ ID No:5), UNC50 (SEQ ID No:6), EPT1 (SEQ ID No:7), RTN4IP1 (SEQ ID No:8), SPTLC2 (SEQ ID No:9), SEC14L1 (SEQ ID No:10), CCDC22 (SEQ ID No:11), SPTSSA (SEQ ID No:12), KIAA1033 (SEQ ID No:13), SPTLC1 (SEQ ID No:14), VPS54 (SEQ ID No:15), TSSC1 (SEQ ID No:16), KIF11 (SEQ ID No:17), NDUFS4 (SEQ ID No:18), COMMD4 (SEQ ID No:19), COL4A3BP (SEQ ID No:20), VPS51 (SEQ ID No:21), VPS52 (SEQ ID No:22) and VPS53 (SEQ ID No:23), more preferably a loss of function mutation in C18orf8 (SEQ ID No:2) and a mutation in gene VPS54,
[0046] optionally comprising the further step of providing in the individual a lysosomotropic compound, preferably chloroquine, azithromycin, dririthromycin, clarithromycin, erithromycin, promethazine, cyclizine, amodiaquine, telithromycin, tripelennamine, clemastine fumarate, hydroxyzine, rifabutin, mefloquine, chlorcyclyzine, homochlorcyclzine, quinacrine, meclizine, tilorone, bepotastine besilate, vicriviroc, hydroxychloroquine, quinine, arbidol, nelfinavir or tamoxifen, wherein the lysosomotropic compound and itraconazole are provided in synergistically effective amounts.

[0047] Embodiment 3: A method for preventing or treating cancer, preferably ovarian cancer, more preferably platinum resistant or refractory epithelilal ovarian cancer in an individual, comprising
[0048] administering a therapeutically effective amount of itraconazole to the individual wherein a cancer cell of the individual has a mutation, preferably a loss of function mutation in COG6 (SEQ ID No:3); more preferably a loss of function mutation in COG6 (SEQ ID No:3) and a mutation in a gene selected from the group consisting of NBEAL1 (SEQ ID No:1), C18orf8 (SEQ ID No:2), SLC30A9 (SEQ ID No:4), ARL1 (SEQ ID No:5), UNC50 (SEQ ID No:6), EPT1 (SEQ ID No:7), RTN4IP1 (SEQ ID No:8), SPTLC2 (SEQ ID No:9), SEC14L1 (SEQ ID No:10), CCDC22 (SEQ ID No:11), SPTSSA (SEQ ID No:12), KIAA1033 (SEQ ID No:13), SPTLC1 (SEQ ID No:14), VPS54 (SEQ ID No:15), TSSC1 (SEQ ID No:16), KIF11 (SEQ ID No:17), NDUFS4 (SEQ ID No:18), COMMD4 (SEQ ID No:19), COL4A3BP (SEQ ID No:20), VPS51 (SEQ ID No:21), VPS52 (SEQ ID No:22) and VPS53 (SEQ ID No:23), more preferably a loss of function mutation in COG6 (SEQ ID No:3) and a mutation in a gene selected from the group consisting of C18orf8 and VPS54,
[0049] optionally comprising the further step of providing in the individual a lysosomotropic compound, preferably chloroquine, azithromycin, dririthromycin, clarithromycin, erithromycin, promethazine, cyclizine, amodiaquine, telithromycin, tripelennamine, clemastine fumarate, hydroxyzine, rifabutin, mefloquine, chlorcyclyzine, homochlorcyclzine, quinacrine, meclizine, tilorone, bepotastine besilate, vicriviroc, hydroxychloroquine, quinine, arbidol, nelfinavir or tamoxifen, wherein the lysosomotropic compound and itraconazole are provided in synergistically effective amounts.

[0050] Embodiment 4: A method for preventing or treating cancer, preferably ovarian cancer, more preferably platinum resistant or refractory epithelilal ovarian cancer in an individual, comprising
[0051] administering a therapeutically effective amount of itraconazole to the individual wherein a cancer cell of the individual has a mutation, preferably a loss of function mutation in SLC30A9 (SEQ ID No:4); more preferably a loss of function mutation in SLC30A9 (SEQ ID No:4) and a mutation in a gene selected from the group consisting of NBEAL1 (SEQ ID No:1), C18orf8 (SEQ ID No:2), COG6 (SEQ ID No:3), ARL1 (SEQ ID No:5), UNC50 (SEQ ID No:6), EPT1 (SEQ ID No:7), RTN4IP1 (SEQ ID No:8), SPTLC2 (SEQ ID No:9), SEC14L1 (SEQ ID No:10), CCDC22 (SEQ ID No:11), SPTSSA (SEQ ID No:12), KIAA1033 (SEQ ID No:13), SPTLC1 (SEQ ID No:14), VPS54 (SEQ ID No:15), TSSC1 (SEQ ID No:16), KIF11 (SEQ ID No:17), NDUFS4 (SEQ ID No:18), COMMD4 (SEQ ID No:19), COL4A3BP (SEQ ID No:20), VPS51 (SEQ ID No:21), VPS52 (SEQ ID No:22) and VPS53 (SEQ ID No:23), more preferably a loss of function mutation in SLC30A9 (SEQ ID No:4) and a mutation in a gene selected from the group consisting of C18orf8 and VPS54,
[0052] optionally comprising the further step of providing in the individual a lysosomotropic compound, preferably chloroquine, azithromycin, dririthromycin, clarithromycin, erithromycin, promethazine, cyclizine, amodiaquine, telithromycin, tripelennamine, clemastine fumarate, hydroxyzine, rifabutin, mefloquine, chlorcyclyzine, homochlorcyclzine, quinacrine, meclizine, tilorone, bepotastine besilate, vicriviroc, hydroxychloroquine, quinine, arbidol, nelfinavir or tamoxifen, wherein the lysosomotropic compound and itraconazole are provided in synergistically effective amounts.

[0053] Embodiment 5: A method for preventing or treating cancer, preferably ovarian cancer, more preferably platinum resistant or refractory epithelilal ovarian cancer in an individual, comprising
[0054] administering a therapeutically effective amount of itraconazole to the individual wherein a cancer cell of the individual has a mutation, preferably a loss of function mutation in ARL1 (SEQ ID No:5); more preferably a loss of function mutation in ARL1 (SEQ ID No:5) and a mutation in a gene selected from the group consisting of NBEAL1 (SEQ ID No:1), C18orf8 (SEQ ID No:2), COG6 (SEQ ID No:3), SLC30A9 (SEQ ID No:4), UNC50 (SEQ ID No:6), EPT1 (SEQ ID No:7), RTN4IP1 (SEQ ID No:8), SPTLC2 (SEQ ID No:9), SEC14L1 (SEQ ID No:10), CCDC22 (SEQ ID No:11), SPTSSA (SEQ ID No:12), KIAA1033 (SEQ ID No:13), SPTLC1 (SEQ ID No:14), VPS54 (SEQ ID No:15), TSSC1 (SEQ ID No:16), KIF11 (SEQ ID No:17), NDUFS4 (SEQ ID No:18), COMMD4 (SEQ ID No:19), COL4A3BP (SEQ ID No:20), VPS51 (SEQ ID No:21), VPS52 (SEQ ID No:22) and VPS53 (SEQ ID No:23), more preferably a loss of function mutation in ARL1 (SEQ ID No:5) and a mutation in a gene selected from the group consisting of C18orf8 and VPS54,
[0055] optionally comprising the further step of providing in the individual a lysosomotropic compound, preferably chloroquine, azithromycin, dririthromycin, clarithromycin, erithromycin, promethazine, cyclizine, amodiaquine, telithromycin, tripelennamine, clemastine fumarate, hydroxyzine, rifabutin, mefloquine, chlorcyclyzine, homochlorcyclzine, quinacrine, meclizine, tilorone, bepotastine besilate, vicriviroc, hydroxychloroquine, quinine, arbidol, nelfinavir or tamoxifen, wherein the lysosomotropic compound and itraconazole are provided in synergistically effective amounts.

[0056] Embodiment 6: A method for preventing or treating cancer, preferably ovarian cancer, more preferably platinum resistant or refractory epithelilal ovarian cancer in an individual, comprising
[0057] administering a therapeutically effective amount of itraconazole to the individual wherein a cancer cell of the individual has a mutation, preferably a loss of function mutation in UNC50 (SEQ ID No:6); more preferably a loss of function mutation in UNC50 (SEQ ID No:6) and a mutation in a gene selected from the group consisting of NBEAL1 (SEQ ID No:1), C18orf8 (SEQ ID No:2), COG6 (SEQ ID No:3), SLC30A9 (SEQ ID No:4), ARL1 (SEQ ID No:5), EPT1 (SEQ ID No:7), RTN4IP1 (SEQ ID No:8), SPTLC2 (SEQ ID No:9), SEC14L1 (SEQ ID No:10), CCDC22 (SEQ ID No:11), SPTSSA (SEQ ID No:12), KIAA1033 (SEQ ID No:13), SPTLC1 (SEQ ID No:14), VPS54 (SEQ ID No:15), TSSC1 (SEQ ID No:16), KIF11 (SEQ ID No:17), NDUFS4 (SEQ ID No:18), COMMD4 (SEQ ID No:19), COL4A3BP (SEQ ID No:20), VPS51 (SEQ ID No:21), VPS52 (SEQ ID No:22) and VPS53 (SEQ ID No:23), more preferably a loss of function mutation in UNC50 (SEQ ID No:6) and a mutation in a gene selected from the group consisting of C18orf8 and VPS54,
[0058] optionally comprising the further step of providing in the individual a lysosomotropic compound, preferably chloroquine, azithromycin, dririthromycin, clarithromycin, erithromycin, promethazine, cyclizine, amodiaquine, telithromycin, tripelennamine, clemastine fumarate, hydroxyzine, rifabutin, mefloquine, chlorcyclyzine, homochlorcyclzine, quinacrine, meclizine, tilorone, bepotastine besilate, vicriviroc, hydroxychloroquine, quinine, arbidol, nelfinavir or tamoxifen, wherein the lysosomotropic compound and itraconazole are provided in synergistically effective amounts.

[0059] Embodiment 7: A method for preventing or treating cancer, preferably ovarian cancer, more preferably platinum resistant or refractory epithelilal ovarian cancer in an individual, comprising
[0060] administering a therapeutically effective amount of itraconazole to the individual wherein a cancer cell of the individual has a mutation, preferably a loss of function mutation in EPT1 (SEQ ID No:7); more preferably a loss of function mutation in EPT1 (SEQ ID No:7) and a mutation in a gene selected from the group consisting of NBEAL1 (SEQ ID No:1), C18orf8 (SEQ ID No:2), COG6 (SEQ ID No:3), SLC30A9 (SEQ ID No:4), ARL1 (SEQ ID No:5), UNC50 (SEQ ID No:6), RTN4IP1 (SEQ ID No:8), SPTLC2 (SEQ ID No:9), SEC14L1 (SEQ ID No:10), CCDC22 (SEQ ID No:11), SPTSSA (SEQ ID No:12), KIAA1033 (SEQ ID No:13), SPTLC1 (SEQ ID No:14), VPS54 (SEQ ID No:15), TSSC1 (SEQ ID No:16), KIF11 (SEQ ID No:17), NDUFS4 (SEQ ID No:18), COMMD4 (SEQ ID No:19), COL4A3BP (SEQ ID No:20), VPS51 (SEQ ID No:21), VPS52 (SEQ ID No:22) and VPS53 (SEQ ID No:23), more preferably a loss of function mutation in EPT1 (SEQ ID No:7) and a mutation in a gene selected from the group consisting of C18orf8 and VPS54,
[0061] optionally comprising the further step of providing in the individual a lysosomotropic compound, preferably chloroquine, azithromycin, dririthromycin, clarithromycin, erithromycin, promethazine, cyclizine, amodiaquine, telithromycin, tripelennamine, clemastine fumarate, hydroxyzine, rifabutin, mefloquine, chlorcyclyzine, homochlorcyclzine, quinacrine, meclizine, tilorone, bepotastine besilate, vicriviroc, hydroxychloroquine, quinine, arbidol, nelfinavir or tamoxifen, wherein the lysosomotropic compound and itraconazole are provided in synergistically effective amounts.

[0062] Embodiment 8: A method for preventing or treating cancer, preferably ovarian cancer, more preferably platinum resistant or refractory epithelilal ovarian cancer in an individual, comprising
[0063] administering a therapeutically effective amount of itraconazole to the individual wherein a cancer cell of the individual has a mutation, preferably a loss of function mutation in RTN4IP1 (SEQ ID No:8); more preferably a loss of function mutation in RTN4IP1 (SEQ ID No:8) and a mutation in a gene selected from the group consisting of NBEAL1 (SEQ ID No:1), C18orf8 (SEQ ID No:2), COG6 (SEQ ID No:3), SLC30A9 (SEQ ID No:4), ARL1 (SEQ ID No:5), UNC50 (SEQ ID No:6), EPT1 (SEQ ID No:7), SPTLC2 (SEQ ID No:9), SEC14L1 (SEQ ID No:10), CCDC22 (SEQ ID No:11), SPTSSA (SEQ ID No:12), KIAA1033 (SEQ ID No:13), SPTLC1 (SEQ ID No:14), VPS54 (SEQ ID No:15), TSSC1 (SEQ ID No:16), KIF11 (SEQ ID No:17), NDUFS4 (SEQ ID No:18), COMMD4 (SEQ ID No:19), COL4A3BP (SEQ ID No:20), VPS51 (SEQ ID No:21), VPS52 (SEQ ID No:22) and VPS53 (SEQ ID No:23), more preferably a loss of function mutation in RTN4IP1 (SEQ ID No:8) and a mutation in a gene selected from the group consisting of C18orf8 and VPS54,
[0064] optionally comprising the further step of providing in the individual a lysosomotropic compound, preferably chloroquine, azithromycin, dririthromycin, clarithromycin, erithromycin, promethazine, cyclizine, amodiaquine, telithromycin, tripelennamine, clemastine fumarate, hydroxyzine, rifabutin, mefloquine, chlorcyclyzine, homochlorcyclzine, quinacrine, meclizine, tilorone, bepotastine besilate, vicriviroc, hydroxychloroquine, quinine, arbidol, nelfinavir or tamoxifen, wherein the lysosomotropic compound and itraconazole are provided in synergistically effective amounts.

[0065] Embodiment 9: A method for preventing or treating cancer, preferably ovarian cancer, more preferably platinum resistant or refractory epithelilal ovarian cancer in an individual, comprising
[0066] administering a therapeutically effective amount of itraconazole to the individual wherein a cancer cell of the individual has a mutation, preferably a loss of function mutation in SPTLC2 (SEQ ID No:9); more preferably a loss of function mutation in SPTLC2 (SEQ ID No:9) and a mutation in a gene selected from the group consisting of NBEAL1 (SEQ ID No:1); C18orf8 (SEQ ID No:2), COG6 (SEQ ID No:3), SLC30A9 (SEQ ID No:4), ARL1 (SEQ ID No:5), UNC50 (SEQ ID No:6), EPT1 (SEQ ID No:7), RTN4IP1 (SEQ ID No:8), SEC14L1 (SEQ ID No:10), CCDC22 (SEQ ID No:11), SPTSSA (SEQ ID No:12), KIAA1033 (SEQ ID No:13), SPTLC1 (SEQ ID No:14), VPS54 (SEQ ID No:15), TSSC1 (SEQ ID No:16), KIF11 (SEQ ID No:17), NDUFS4 (SEQ ID No:18), COMMD4 (SEQ ID No:19), COL4A3BP (SEQ ID No:20), VPS51 (SEQ ID No:21), VPS52 (SEQ ID No:22) and VPS53 (SEQ ID No:23), more preferably a loss of function mutation in SPTLC2 (SEQ ID No:9) and a mutation in a gene selected from the group consisting of C18orf8 and VPS54,
[0067] optionally comprising the further step of providing in the individual a lysosomotropic compound, preferably chloroquine, azithromycin, dririthromycin, clarithromycin, erithromycin, promethazine, cyclizine, amodiaquine, telithromycin, tripelennamine, clemastine fumarate, hydroxyzine, rifabutin, mefloquine, chlorcyclyzine, homochlorcyclzine, quinacrine, meclizine, tilorone, bepotastine besilate, vicriviroc, hydroxychloroquine, quinine, arbidol, nelfinavir or tamoxifen, wherein the lysosomotropic compound and itraconazole are provided in synergistically effective amounts.

[0068] Embodiment 10: A method for preventing or treating cancer, preferably ovarian cancer, more preferably platinum resistant or refractory epithelilal ovarian cancer in an individual, comprising
[0069] administering a therapeutically effective amount of itraconazole to the individual wherein a cancer cell of the individual has a mutation, preferably a loss of function mutation in SEC14L1 (SEQ ID No:10); more preferably a loss of function mutation in SEC14L1 (SEQ ID No:10) and a mutation in a gene selected from the group consisting of NBEAL1 (SEQ ID No:1); C18orf8 (SEQ ID No:2), COG6 (SEQ ID No:3), SLC30A9 (SEQ ID No:4), ARL1 (SEQ ID No:5), UNC50 (SEQ ID No:6), EPT1 (SEQ ID No:7), RTN4IP1 (SEQ ID No:8), SPTLC2 (SEQ ID No:9), CCDC22 (SEQ ID No:11), SPTSSA (SEQ ID No:12), KIAA1033 (SEQ ID No:13), SPTLC1 (SEQ ID No:14), VPS54 (SEQ ID No:15), TSSC1 (SEQ ID No:16), KIF11 (SEQ ID No:17), NDUFS4 (SEQ ID No:18), COMMD4 (SEQ ID No:19), COL4A3BP (SEQ ID No:20), VPS51 (SEQ ID No:21), VPS52 (SEQ ID No:22) and VPS53 (SEQ ID No:23), more preferably a loss of function mutation in SEC14L1 (SEQ ID No:10) and a mutation in a gene selected from the group consisting of C18orf8 and VPS54,
[0070] optionally comprising the further step of providing in the individual a lysosomotropic compound, preferably chloroquine, azithromycin, dririthromycin, clarithromycin, erithromycin, promethazine, cyclizine, amodiaquine, telithromycin, tripelennamine, clemastine fumarate, hydroxyzine, rifabutin, mefloquine, chlorcyclyzine, homochlorcyclzine, quinacrine, meclizine, tilorone, bepotastine besilate, vicriviroc, hydroxychloroquine, quinine, arbidol, nelfinavir or tamoxifen, wherein the lysosomotropic compound and itraconazole are provided in synergistically effective amounts.

[0071] Embodiment 11: A method for preventing or treating cancer, preferably ovarian cancer, more preferably platinum resistant or refractory epithelilal ovarian cancer in an individual, comprising
[0072] administering a therapeutically effective amount of itraconazole to the individual wherein a cancer cell of the individual has a mutation, preferably a loss of function mutation in CCDC22 (SEQ ID No:11); more preferably a loss of function mutation in CCDC22 (SEQ ID No:11) and a mutation in a gene selected from the group consisting of NBEAL1 (SEQ ID No:1), C18orf8 (SEQ ID No:2), COG6 (SEQ ID No:3), SLC30A9 (SEQ ID No:4), ARL1 (SEQ ID No:5), UNC50 (SEQ ID No:6), EPT1 (SEQ ID No:7), RTN4IP1 (SEQ ID No:8), SPTLC2 (SEQ ID No:9), SEC14L1 (SEQ ID No:10), SPTSSA (SEQ ID No:12), KIAA1033 (SEQ ID No:13), SPTLC1 (SEQ ID No:14), VPS54 (SEQ ID No:15), TSSC1 (SEQ ID No:16), KIF11 (SEQ ID No:17), NDUFS4 (SEQ ID No:18), COMMD4 (SEQ ID No:19), COL4A3BP (SEQ ID No:20), VPS51 (SEQ ID No:21), VPS52 (SEQ ID No:22) and VPS53 (SEQ ID No:23), more preferably a loss of function mutation in CCDC22 (SEQ ID No:11) and a mutation in a gene selected from the group consisting of C18orf8 and VPS54,
[0073] optionally comprising the further step of providing in the individual a lysosomotropic compound, preferably chloroquine, azithromycin, dririthromycin, clarithromycin, erithromycin, promethazine, cyclizine, amodiaquine, telithromycin, tripelennamine, clemastine fumarate, hydroxyzine, rifabutin, mefloquine, chlorcyclyzine, homochlorcyclzine, quinacrine, meclizine, tilorone, bepotastine besilate, vicriviroc, hydroxychloroquine, quinine, arbidol, nelfinavir or tamoxifen, wherein the lysosomotropic compound and itraconazole are provided in synergistically effective amounts.

[0074] Embodiment 12: A method for preventing or treating cancer, preferably ovarian cancer, more preferably platinum resistant or refractory epithelilal ovarian cancer in an individual, comprising
[0075] administering a therapeutically effective amount of itraconazole to the individual wherein a cancer cell of the individual has a mutation, preferably a loss of function mutation in SPTSSA (SEQ ID No:12); more preferably a loss of function mutation in SPTSSA (SEQ ID No:12) and a mutation in a gene selected from the group consisting of NBEAL1 (SEQ ID No:1), C18orf8 (SEQ ID No:2), COG6 (SEQ ID No:3), SLC30A9 (SEQ ID No:4), ARL1 (SEQ ID No:5), UNC50 (SEQ ID No:6), EPT1 (SEQ ID No:7), RTN4IP1 (SEQ ID No:8), SPTLC2 (SEQ ID No:9), SEC14L1 (SEQ ID No:10), CCDC22 (SEQ ID No:11), KIAA1033 (SEQ ID No:13), SPTLC1 (SEQ ID No:14), VPS54 (SEQ ID No:15), TSSC1 (SEQ ID No:16), KIF11 (SEQ ID No:17), NDUFS4 (SEQ ID No:18), COMMD4 (SEQ ID No:19), COL4A3BP (SEQ ID No:20), VPS51 (SEQ ID No:21), VPS52 (SEQ ID No:22) and VPS53 (SEQ ID No:23), more preferably a loss of function mutation in SPTSSA (SEQ ID No:12) and a mutation in a gene selected from the group consisting of C18orf8 and VPS54,
[0076] optionally comprising the further step of providing in the individual a lysosomotropic compound, preferably chloroquine, azithromycin, dririthromycin, clarithromycin, erithromycin, promethazine, cyclizine, amodiaquine, telithromycin, tripelennamine, clemastine fumarate, hydroxyzine, rifabutin, mefloquine, chlorcyclyzine, homochlorcyclzine, quinacrine, meclizine, tilorone, bepotastine besilate, vicriviroc, hydroxychloroquine, quinine, arbidol, nelfinavir or tamoxifen, wherein the lysosomotropic compound and itraconazole are provided in synergistically effective amounts.

[0077] Embodiment 13: A method for preventing or treating cancer, preferably ovarian cancer, more preferably platinum resistant or refractory epithelilal ovarian cancer in an individual, comprising
[0078] administering a therapeutically effective amount of itraconazole to the individual wherein a cancer cell of the individual has a mutation, preferably a loss of function mutation in KIAA1033 (SEQ ID No:13); more preferably a loss of function mutation in KIAA1033 (SEQ ID No:13) and a mutation in a gene selected from the group consisting of NBEAL1 (SEQ ID No:1), C18orf8 (SEQ ID No:2), COG6 (SEQ ID No:3), SLC30A9 (SEQ ID No:4), ARL1 (SEQ ID No:5), UNC50 (SEQ ID No:6), EPT1 (SEQ ID No:7), RTN4IP1 (SEQ ID No:8), SPTLC2 (SEQ ID No:9), SEC14L1 (SEQ ID No:10), CCDC22 (SEQ ID No:11), SPTSSA (SEQ ID No:12), SPTLC1 (SEQ ID No:14), VPS54 (SEQ ID No:15), TSSC1 (SEQ ID No:16), KIF11 (SEQ ID No:17), NDUFS4 (SEQ ID No:18), COMMD4 (SEQ ID No:19), COL4A3BP (SEQ ID No:20), VPS51 (SEQ ID No:21), VPS52 (SEQ ID No:22) and VPS53 (SEQ ID No:23), more preferably a loss of function mutation in KIAA1033 (SEQ ID No:13) and a mutation in a gene selected from the group consisting of C18orf8 and VPS54,
[0079] optionally comprising the further step of providing in the individual a lysosomotropic compound, preferably chloroquine, azithromycin, dririthromycin, clarithromycin, erithromycin, promethazine, cyclizine, amodiaquine, telithromycin, tripelennamine, clemastine fumarate, hydroxyzine, rifabutin, mefloquine, chlorcyclyzine, homochlorcyclzine, quinacrine, meclizine, tilorone, bepotastine besilate, vicriviroc, hydroxychloroquine, quinine, arbidol, nelfinavir or tamoxifen, wherein the lysosomotropic compound and itraconazole are provided in synergistically effective amounts.

[0080] Embodiment 14: A method for preventing or treating cancer, preferably ovarian cancer, more preferably platinum resistant or refractory epithelilal ovarian cancer in an individual, comprising
[0081] administering a therapeutically effective amount of itraconazole to the individual wherein a cancer cell of the individual has a mutation, preferably a loss of function mutation in SPTLC1 (SEQ ID No:14); more preferably a loss of function mutation in SPTLC1 (SEQ ID No:14), and a mutation in a gene selected from the group consisting of NBEAL1 (SEQ ID No:1), C18orf8 (SEQ ID No:2), COG6 (SEQ ID No:3), SLC30A9 (SEQ ID No:4), ARL1 (SEQ ID No:5), UNC50 (SEQ ID No:6), EPT1 (SEQ ID No:7), RTN4IP1 (SEQ ID No:8), SPTLC2 (SEQ ID No:9), SEC14L1 (SEQ ID No:10), CCDC22 (SEQ ID No:11), SPTSSA (SEQ ID No:12), KIAA1033 (SEQ ID No:13), VPS54 (SEQ ID No:15), TSSC1 (SEQ ID No:16), KIF11 (SEQ ID No:17), NDUFS4 (SEQ ID No:18), COMMD4 (SEQ ID No:19), COL4A3BP (SEQ ID No:20), VPS51 (SEQ ID No:21), VPS52 (SEQ ID No:22) and VPS53 (SEQ ID No:23), more preferably a loss of function mutation in SPTLC1 (SEQ ID No:14) and a mutation in a gene selected from the group consisting of C18orf8 and VPS54,
[0082] optionally comprising the further step of providing in the individual a lysosomotropic compound, preferably chloroquine, azithromycin, dririthromycin, clarithromycin, erithromycin, promethazine, cyclizine, amodiaquine, telithromycin, tripelennamine, clemastine fumarate, hydroxyzine, rifabutin, mefloquine, chlorcyclyzine, homochlorcyclzine, quinacrine, meclizine, tilorone, bepotastine besilate, vicriviroc, hydroxychloroquine, quinine, arbidol, nelfinavir or tamoxifen, wherein the lysosomotropic compound and itraconazole are provided in synergistically effective amounts.

[0083] Embodiment 15: A method for preventing or treating cancer, preferably ovarian cancer, more preferably platinum resistant or refractory epithelilal ovarian cancer in an individual, comprising
[0084] administering a therapeutically effective amount of itraconazole to the individual wherein a cancer cell of the individual has a mutation, preferably a loss of function mutation in VPS54 (SEQ ID No:15); more preferably a loss of function mutation in VPS54 (SEQ ID No:15) and a mutation in a gene selected from the group consisting of NBEAL1 (SEQ ID No:1), C18orf8 (SEQ ID No:2), COG6 (SEQ ID No:3), SLC30A9 (SEQ ID No:4), ARL1 (SEQ ID No:5), UNC50 (SEQ ID No:6), EPT1 (SEQ ID No:7), RTN4IP1 (SEQ ID No:8), SPTLC2 (SEQ ID No:9), SEC14L1 (SEQ ID No:10), CCDC22 (SEQ ID No:11), SPTSSA (SEQ ID No:12), KIAA1033 (SEQ ID No:13), SPTLC1 (SEQ ID No:14), TSSC1 (SEQ ID No:16), KIF11 (SEQ ID No:17), NDUFS4 (SEQ ID No:18), COMMD4 (SEQ ID No:19), COL4A3BP (SEQ ID No:20), VPS51 (SEQ ID No:21), VPS52 (SEQ ID No:22) and VPS53 (SEQ ID No:23), more preferably a loss of function mutation in VPS54 (SEQ ID No:15) and a mutation in the C18orf8 gene,
[0085] optionally comprising the further step of providing in the individual a lysosomotropic compound, preferably chloroquine, azithromycin, dririthromycin, clarithromycin, erithromycin, promethazine, cyclizine, amodiaquine, telithromycin, tripelennamine, clemastine fumarate, hydroxyzine, rifabutin, mefloquine, chlorcyclyzine, homochlorcyclzine, quinacrine, meclizine, tilorone, bepotastine besilate, vicriviroc, hydroxychloroquine, quinine, arbidol, nelfinavir or tamoxifen, wherein the lysosomotropic compound and itraconazole are provided in synergistically effective amounts.

[0086] Embodiment 16: A method for preventing or treating cancer, preferably ovarian cancer, more preferably platinum resistant or refractory epithelilal ovarian cancer in an individual, comprising
[0087] administering a therapeutically effective amount of itraconazole to the individual wherein a cancer cell of the individual has a mutation, preferably a loss of function mutation in TSSC1 (SEQ ID No:16); more preferably a loss of function mutation in TSSC1 (SEQ ID No:16) and a mutation in a gene selected from the group consisting of NBEAL1 (SEQ ID No:1), C18orf8 (SEQ ID No:2), COG6 (SEQ ID No:3), SLC30A9 (SEQ ID No:4), ARL1 (SEQ ID No:5), UNC50 (SEQ ID No:6), EPT1 (SEQ ID No:7), RTN4IP1 (SEQ ID No:8), SPTLC2 (SEQ ID No:9), SEC14L1 (SEQ ID No:10), CCDC22 (SEQ ID No:11), SPTSSA (SEQ ID No:12), KIAA1033 (SEQ ID No:13), SPTLC1 (SEQ ID No:14), VPS54 (SEQ ID No:15), KIF11 (SEQ ID No:17), NDUFS4 (SEQ ID No:18), COMMD4 (SEQ ID No:19), COL4A3BP (SEQ ID No:20), VPS51 (SEQ ID No:21), VPS52 (SEQ ID No:22) and VPS53 (SEQ ID No:23), more preferably a loss of function mutation in TSSC1 (SEQ ID No:16) and a mutation in a gene selected from the group consisting of C18orf8 and VPS54,
[0088] optionally comprising the further step of providing in the individual a lysosomotropic compound, preferably chloroquine, azithromycin, dririthromycin, clarithromycin, erithromycin, promethazine, cyclizine, amodiaquine, telithromycin, tripelennamine, clemastine fumarate, hydroxyzine, rifabutin, mefloquine, chlorcyclyzine, homochlorcyclzine, quinacrine, meclizine, tilorone, bepotastine besilate, vicriviroc, hydroxychloroquine, quinine, arbidol, nelfinavir or tamoxifen, wherein the lysosomotropic compound and itraconazole are provided in synergistically effective amounts.

[0089] Embodiment 17: A method for preventing or treating cancer, preferably ovarian cancer, more preferably platinum resistant or refractory epithelilal ovarian cancer in an individual, comprising
[0090] administering a therapeutically effective amount of itraconazole to the individual wherein a cancer cell of the individual has a mutation, preferably a loss of function mutation in KIF11 (SEQ ID No:17); more preferably a loss of function mutation in KIF11 (SEQ ID No:17) and a mutation in a gene selected from the group consisting of NBEAL1 (SEQ ID No:1), C18orf8 (SEQ ID No:2), COG6 (SEQ ID No:3), SLC30A9 (SEQ ID No:4), ARL1 (SEQ ID No:5), UNC50 (SEQ ID No:6), EPT1 (SEQ ID No:7), RTN4IP1 (SEQ ID No:8), SPTLC2 (SEQ ID No:9), SEC14L1 (SEQ ID No:10), CCDC22 (SEQ ID No:11), SPTSSA (SEQ ID No:12), KIAA1033 (SEQ ID No:13), SPTLC1 (SEQ ID No:14), VPS54 (SEQ ID No:15), TSSC1 (SEQ ID No:16), NDUFS4 (SEQ ID No:18), COMMD4 (SEQ ID No:19), COL4A3BP (SEQ ID No:20), VPS51 (SEQ ID No:21), VPS52 (SEQ ID No:22) and VPS53 (SEQ ID No:23), more preferably a loss of function mutation in KIF11 (SEQ ID No:17) and a mutation in a gene selected from the group consisting of C18orf8 and VPS54,
[0091] optionally comprising the further step of providing in the individual a lysosomotropic compound, preferably chloroquine, azithromycin, dririthromycin, clarithromycin, erithromycin, promethazine, cyclizine, amodiaquine, telithromycin, tripelennamine, clemastine fumarate, hydroxyzine, rifabutin, mefloquine, chlorcyclyzine, homochlorcyclzine, quinacrine, meclizine, tilorone, bepotastine besilate, vicriviroc, hydroxychloroquine, quinine, arbidol, nelfinavir or tamoxifen, wherein the lysosomotropic compound and itraconazole are provided in synergistically effective amounts.

[0092] Embodiment 18: A method for preventing or treating cancer, preferably ovarian cancer, more preferably platinum resistant or refractory epithelilal ovarian cancer in an individual, comprising
[0093] administering a therapeutically effective amount of itraconazole to the individual wherein a cancer cell of the individual has a mutation, preferably a loss of function mutation in NDUFS4 (SEQ ID No:18); more preferably a loss of function mutation in NDUFS4 (SEQ ID No:18) and a mutation in a gene selected from the group consisting of NBEAL1 (SEQ ID No:1), C18orf8 (SEQ ID No:2), COG6 (SEQ ID No:3), SLC30A9 (SEQ ID No:4), ARL1 (SEQ ID No:5), UNC50 (SEQ ID No:6), EPT1 (SEQ ID No:7), RTN4IP1 (SEQ ID No:8), SPTLC2 (SEQ ID No:9), SEC14L1 (SEQ ID No:10), CCDC22 (SEQ ID No:11), SPTSSA (SEQ ID No:12), KIAA1033 (SEQ ID No:13), SPTLC1 (SEQ ID No:14), VPS54 (SEQ ID No:15), TSSC1 (SEQ ID No:16), KIF11 (SEQ ID No:17), COMMD4 (SEQ ID No:19), COL4A3BP (SEQ ID No:20), VPS51 (SEQ ID No:21), VPS52 (SEQ ID No:22) and VPS53 (SEQ ID No:23), more preferably a loss of function mutation in NDUFS4 (SEQ ID No:18) and a mutation in a gene selected from the group consisting of C18orf8 and VPS54,
[0094] optionally comprising the further step of providing in the individual a lysosomotropic compound, preferably chloroquine, azithromycin, dririthromycin, clarithromycin, erithromycin, promethazine, cyclizine, amodiaquine, telithromycin, tripelennamine, clemastine fumarate, hydroxyzine, rifabutin, mefloquine, chlorcyclyzine, homochlorcyclzine, quinacrine, meclizine, tilorone, bepotastine besilate, vicriviroc, hydroxychloroquine, quinine, arbidol, nelfinavir or tamoxifen, wherein the lysosomotropic compound and itraconazole are provided in synergistically effective amounts.

[0095] Embodiment 19: A method for preventing or treating cancer, preferably ovarian cancer, more preferably platinum resistant or refractory epithelilal ovarian cancer in an individual, comprising
[0096] administering a therapeutically effective amount of itraconazole to the individual wherein a cancer cell of the individual has a mutation, preferably a loss of function mutation in COMMD4 (SEQ ID No:19); more preferably a loss of function mutation in COMMD4 (SEQ ID No:19) and a mutation in a gene selected from the group consisting of NBEAL1 (SEQ ID No:1), C18orf8 (SEQ ID No:2), COG6 (SEQ ID No:3), SLC30A9 (SEQ ID No:4), ARL1 (SEQ ID No:5), UNC50 (SEQ ID No:6), EPT1 (SEQ ID No:7), RTN4IP1 (SEQ ID No:8), SPTLC2 (SEQ ID No:9), SEC14L1 (SEQ ID No:10), CCDC22 (SEQ ID No:11), SPTSSA (SEQ ID No:12), KIAA1033 (SEQ ID No:13), SPTLC1 (SEQ ID No:14), VPS54 (SEQ ID No:15), TSSC1 (SEQ ID No:16), KIF11 (SEQ ID No:17), NDUFS4 (SEQ ID No:18), COL4A3BP (SEQ ID No:20), VPS51 (SEQ ID No:21), VPS52 (SEQ ID No:22) and VPS53 (SEQ ID No:23), more preferably a loss of function mutation in COMMD4 (SEQ ID No:19) and a mutation in a gene selected from the group consisting of C18orf8 and VPS54,
[0097] optionally comprising the further step of providing in the individual a lysosomotropic compound, preferably chloroquine, azithromycin, dririthromycin, clarithromycin, erithromycin, promethazine, cyclizine, amodiaquine, telithromycin, tripelennamine, clemastine fumarate, hydroxyzine, rifabutin, mefloquine, chlorcyclyzine, homochlorcyclzine, quinacrine, meclizine, tilorone, bepotastine besilate, vicriviroc, hydroxychloroquine, quinine, arbidol, nelfinavir or tamoxifen, wherein the lysosomotropic compound and itraconazole are provided in synergistically effective amounts.

[0098] Embodiment 20: A method for preventing or treating cancer, preferably ovarian cancer, more preferably platinum resistant or refractory epithelilal ovarian cancer in an individual, comprising
[0099] administering a therapeutically effective amount of itraconazole to the individual wherein a cancer cell of the individual has a mutation, preferably a loss of function mutation in COL4A3BP (SEQ ID No:20); more preferably a loss of function mutation in COL4A3BP (SEQ ID No:20) and a mutation in a gene selected from the group consisting of NBEAL1 (SEQ ID No:1), C18orf8 (SEQ ID No:2), COG6 (SEQ ID No:3), SLC30A9 (SEQ ID No:4), ARL1 (SEQ ID No:5), UNC50 (SEQ ID No:6), EPT1 (SEQ ID No:7), RTN4IP1 (SEQ ID No:8), SPTLC2 (SEQ ID No:9), SEC14L1 (SEQ ID No:10), CCDC22 (SEQ ID No:11), SPTSSA (SEQ ID No:12), KIAA1033 (SEQ ID No:13), SPTLC1 (SEQ ID No:14), VPS54 (SEQ ID No:15), TSSC1 (SEQ ID No:16), KIF11 (SEQ ID No:17), NDUFS4 (SEQ ID No:18), COMMD4 (SEQ ID No:19), VPS51 (SEQ ID No:21), VPS52 (SEQ ID No:22) and VPS53 (SEQ ID No:23), more preferably a loss of function mutation in COL4A3BP (SEQ ID No:20) and a mutation in a gene selected from the group consisting of C18orf8 and VPS54,
[0100] optionally comprising the further step of providing in the individual a lysosomotropic compound, preferably chloroquine, azithromycin, dririthromycin, clarithromycin, erithromycin, promethazine, cyclizine, amodiaquine, telithromycin, tripelennamine, clemastine fumarate, hydroxyzine, rifabutin, mefloquine, chlorcyclyzine, homochlorcyclzine, quinacrine, meclizine, tilorone, bepotastine besilate, vicriviroc, hydroxychloroquine, quinine, arbidol, nelfinavir or tamoxifen, wherein the lysosomotropic compound and itraconazole are provided in synergistically effective amounts.

[0101] Embodiment 21: A method for preventing or treating cancer, preferably ovarian cancer, more preferably platinum resistant or refractory epithelilal ovarian cancer in an individual, comprising
[0102] administering a therapeutically effective amount of itraconazole to the individual wherein a cancer cell of the individual has a mutation, preferably a loss of function mutation in VPS51 (SEQ ID No:21); more preferably a loss of function mutation in VPS51 (SEQ ID No:21) and a mutation in a gene selected from the group consisting of NBEAL1 (SEQ ID No:1), C18orf8 (SEQ ID No:2), COG6 (SEQ ID No:3), SLC30A9 (SEQ ID No:4), ARL1 (SEQ ID No:5), UNC50 (SEQ ID No:6), EPT1 (SEQ ID No:7), RTN4IP1 (SEQ ID No:8), SPTLC2 (SEQ ID No:9), SEC14L1 (SEQ ID No:10), CCDC22 (SEQ ID No:11), SPTSSA (SEQ ID No:12), KIAA1033 (SEQ ID No:13), SPTLC1 (SEQ ID No:14), VPS54 (SEQ ID No:15), TSSC1 (SEQ ID No:16), KIF11 (SEQ ID No:17), NDUFS4 (SEQ ID No:18), COMMD4 (SEQ ID No:19), COL4A3BP (SEQ ID No:20), VPS52 (SEQ ID No:22) and VPS53 (SEQ ID No:23), more preferably a loss of function mutation in VPS51 (SEQ ID No:21) and a mutation in a gene selected from the group consisting of C18orf8 and VPS54,
   optionally comprising the further step of providing in the individual a lysosomotropic compound, preferably chloroquine, azithromycin, dririthromycin, clarithromycin, erithromycin, promethazine, cyclizine, amodiaquine, telithromycin, tripelennamine, clemastine fumarate, hydroxyzine, rifabutin, mefloquine, chlorcyclyzine, homochlorcyclzine, quinacrine, meclizine, tilorone, bepotastine besilate, vicriviroc, hydroxychloroquine, quinine, arbidol, nelfinavir or tamoxifen, wherein the lysosomotropic compound and itraconazole are provided in synergistically effective amounts.

[0103] Embodiment 22: A method for preventing or treating cancer, preferably ovarian cancer, more preferably platinum resistant or refractory epithelilal ovarian cancer in an individual, comprising
[0104] administering a therapeutically effective amount of itraconazole to the individual wherein a cancer cell of the individual has a mutation, preferably a loss of function mutation in VPS52 (SEQ ID No:22); more preferably a loss of function mutation in VPS52 (SEQ ID No:22) and a mutation in a gene selected from the group consisting of NBEAL1 (SEQ ID No:1), C18orf8 (SEQ ID No:2), COG6 (SEQ ID No:3), SLC30A9 (SEQ ID No:4), ARL1 (SEQ ID No:5), UNC50 (SEQ ID No:6), EPT1 (SEQ ID No:7), RTN4IP1 (SEQ ID No:8), SPTLC2 (SEQ ID No:9), SEC14L1 (SEQ ID No:10), CCDC22 (SEQ ID No:11), SPTSSA (SEQ ID No:12), KIAA1033 (SEQ ID No:13), SPTLC1 (SEQ ID No:14), VPS54 (SEQ ID No:15), TSSC1 (SEQ ID No:16), KIF11 (SEQ ID No:17), NDUFS4 (SEQ ID No:18), COMMD4 (SEQ ID No:19), VPS51 (SEQ ID No:21), and VPS53 (SEQ ID No:23), more preferably a loss of function mutation in VPS52 (SEQ ID No:22) and a mutation in a gene selected from the group consisting of C18orf8 and VPS54,
   optionally comprising the further step of providing in the individual a lysosomotropic compound, preferably chloroquine, azithromycin, dririthromycin, clarithromycin, erithromycin, promethazine, cyclizine, amodiaquine, telithromycin, tripelennamine, clemastine fumarate, hydroxyzine, rifabutin, mefloquine, chlorcyclyzine, homochlorcyclzine, quinacrine, meclizine, tilorone, bepotastine besilate, vicriviroc, hydroxychloroquine, quinine, arbidol, nelfinavir or tamoxifen, wherein the lysosomotropic compound and itraconazole are provided in synergistically effective amounts.

[0105] Embodiment 23: A method for preventing or treating cancer, preferably ovarian cancer, more preferably platinum resistant or refractory epithelilal ovarian cancer in an individual, comprising
[0106] administering a therapeutically effective amount of itraconazole to the individual wherein a cancer cell of the individual has a mutation, preferably a loss of function mutation in VPS53 (SEQ ID No:23); more preferably a loss of function mutation in VPS53 (SEQ ID No:23) and a mutation in a gene selected from the group consisting of NBEAL1 (SEQ ID No:1), C18orf8 (SEQ ID No:2), COG6 (SEQ ID No:3), SLC30A9 (SEQ ID No:4), ARL1 (SEQ ID No:5), UNC50 (SEQ ID No:6), EPT1 (SEQ ID No:7), RTN4IP1 (SEQ ID No:8), SPTLC2 (SEQ ID No:9), SEC14L1 (SEQ ID No:10), CCDC22 (SEQ ID No:11), SPTSSA (SEQ ID No:12), KIAA1033 (SEQ ID No:13), SPTLC1 (SEQ ID No:14), VPS54 (SEQ ID No:15), TSSC1 (SEQ ID No:16), KIF11 (SEQ ID No:17), NDUFS4 (SEQ ID No:18), COMMD4 (SEQ ID No:19), VPS51 (SEQ ID No:21) and VPS52 (SEQ ID No:22), more preferably a loss of function mutation in VPS53 (SEQ ID No:23) and a mutation in a gene selected from the group consisting of C18orf8 and VPS54,
   optionally comprising the further step of providing in the individual a lysosomotropic compound, preferably chloroquine, azithromycin, dririthromycin, clarithromycin, erithromycin, promethazine, cyclizine, amodiaquine, telithromycin, tripelennamine, clemastine fumarate, hydroxyzine, rifabutin, mefloquine, chlorcyclyzine, homochlorcyclzine, quinacrine, meclizine, tilorone, bepotastine besilate, vicriviroc, hydroxychloroquine, quinine, arbidol, nelfinavir or tamoxifen, wherein the lysosomotropic compound and itraconazole are provided in synergistically effective amounts.

[0107] The method of any one of the above numerated embodiments may further comprise a step of:
[0108] assessing or having assessed a cell of the individual, preferably a cancer cell to determine if the cell has a mutation, preferably a loss of function mutation in a gene selected from the group consisting of: NBEAL1 (SEQ ID No:1), C18orf8 (SEQ ID No:2), COG6 (SEQ ID No:3), SLC30A9 (SEQ ID No:4), ARL1 (SEQ ID No:5), UNC50 (SEQ ID No:6), EPT1 (SEQ ID No:7), RTN4IP1 (SEQ ID No:8), SPTLC2 (SEQ ID No:9), SEC14L1 (SEQ ID No:10), CCDC22 (SEQ ID No:11), SPTSSA (SEQ ID No:12), KIAA1033 (SEQ ID No:13), SPTLC1 (SEQ ID No:14), VPS54 (SEQ ID No:15), TSSC1 (SEQ ID No:16), KIF11 (SEQ ID No:17), NDUFS4 (SEQ ID No:18), COMMD4 (SEQ ID No:19), COL4A3BP (SEQ ID No:20), VPS51 (SEQ ID No:21), VPS52 (SEQ ID No:22) and VPS53 (SEQ ID No:23);
[0109] selecting the individual for treatment of cancer with itraconazole where the individual has a mutation, preferably a loss of function mutation in a gene selected from the group consisting of: NBEAL1 (SEQ ID No:1), C18orf8 (SEQ ID No:2), COG6 (SEQ ID No:3), SLC30A9 (SEQ ID No:4), ARL1 (SEQ ID No:5), UNC50 (SEQ ID No:6), EPT1 (SEQ ID No:7), RTN4IP1 (SEQ ID No:8), SPTLC2 (SEQ ID No:9), SEC14L1 (SEQ ID No:10), CCDC22 (SEQ ID No:11), SPTSSA (SEQ ID No:12), KIAA1033 (SEQ ID No:13), SPTLC1 (SEQ ID No:14), VPS54 (SEQ ID No:15), TSSC1 (SEQ ID No:16), KIF11 (SEQ ID No:17), NDUFS4 (SEQ ID No:18), COMMD4 (SEQ ID No:19), COL4A3BP (SEQ ID No:20), VPS51 (SEQ ID No:21), VPS52 (SEQ ID No:22) and VPS53 (SEQ ID No:23).

[0110] The method of any one of the above enumerated embodiments may comprise the step of:
[0111] determining whether the cell of the individual has reduced production, or no production of a protein or RNA encoded by a gene selected from the group consisting of: NBEAL1 (SEQ ID No:1), C18orf8 (SEQ ID No:2), COG6 (SEQ ID No:3), SLC30A9 (SEQ ID No:4), ARL1 (SEQ ID No:5), UNC50 (SEQ ID No:6), EPT1 (SEQ ID No:7), RTN4IP1 (SEQ ID No:8), SPTLC2 (SEQ ID No:9), SEC14L1 (SEQ ID No:10), CCDC22 (SEQ ID No:11), SPTSSA (SEQ ID No:12), KIAA1033 (SEQ ID No:13), SPTLC1 (SEQ ID No:14), VPS54 (SEQ ID No:15), TSSC1 (SEQ ID No:16), KIF11 (SEQ ID No:17), NDUFS4 (SEQ ID No:18), COMMD4 (SEQ ID No:19), COL4A3BP (SEQ ID No:20), VPS51 (SEQ ID No:21), VPS52 (SEQ ID No:22) and VPS53 (SEQ ID No:23),
   wherein reduced production or no production of a protein or RNA encoded by a gene selected from the group consisting of: NBEAL1 (SEQ ID No:1), C18orf8 (SEQ ID No:2), COG6 (SEQ ID No:3), SLC30A9 (SEQ ID No:4), ARL1 (SEQ ID No:5), UNC50 (SEQ ID No:6), EPT1 (SEQ ID No:7), RTN4IP1 (SEQ ID No:8), SPTLC2 (SEQ ID No:9), SEC14L1 (SEQ ID No:10), CCDC22 (SEQ ID No:11), SPTSSA (SEQ ID No:12), KIAA1033 (SEQ ID No:13), SPTLC1 (SEQ ID No:14), VPS54 (SEQ ID No:15), TSSC1 (SEQ ID No:16), KIF11 (SEQ ID No:17), NDUFS4 (SEQ ID No:18), COMMD4 (SEQ ID No:19), COL4A3BP (SEQ ID No:20), VPS51 (SEQ ID No:21), VPS52 (SEQ ID No:22) and VPS53 (SEQ ID No:23) determines that the cell has a loss of function mutation in the gene,
[0112] thereby determining whether the cell has a loss of function mutation in a gene of said group.

### DETAILED DESCRIPTION OF THE INVENTION

[0113] Itraconazole is a widely used anti-fungal drug that has been investigated in cancer types including cancer of prostate, lung, ovary, breast, pancreas and biliary tract, and basal cell carcinoma, leukemia and NSCLC, as a monotherapy and in combination with other chemotherapeutic drugs, including daunorubicin, docetaxel, and pemetrexed, the latter combination for example as a chemosensitiser. Response profiles have varied from individual to individual with some individuals demonstrating complete or partial remission and others no response at all.

[0114] It has been found herein that cancer cells, especially cancer cells of epithelial origin may contain mutations in specific genes that control an increased sensitivity of those cells to itraconazole either as a monotherapy, or in combination with other chemotherapeutic compounds. In more detail, the CRISPR screen analysis described herein of genes of a panel of itraconazole-sensitive cancer cell lines of epithelial origin identified 20 genes variously associated with in silico predicted pathways including ceramide de novo biosynthesis, Lipid metabolism, Sphingolipid metabolism, Retrograde transport at the Trans-Golgi-Network, Sphingolipid de novo biosynthesis, Intra-Golgi and retrograde Golgi-to-ER traffic, Fabry disease, Gaucher Disease, Globoid Cell Leukodystrophy, Krabbe disease, Metachromatic leukodystrophy, Membrane trafficking, Glycosphingolipid metabolism, Vesicle-mediated transport and Sphingolipid signalling.

[0115] Further, CRISPR knockout models that effectively model the loss of function mutations observed in the genes identified in the CRISPR screen analysis also show sensitivity to itraconazole, underscoring an underlying causation or association between the mutations in the genes identified in the CRISPR screen analysis and a sensitivity of cancer cells having these gene mutations to itraconazole.

[0116] The inventors have considered the association between the mutations described herein and itraconazole sensitivity in the context of a separate clinical trial in which itraconazole was administered in combination with a lysosomotropic agent. The inventors reasoned that the lysosomotropic agent (hydroxy)chloroquine used in the trial with itraconazole should effectively model at least some of the loss of function gene mutations observed in the CRISPR screen analysis. The clinical trial result supports the findings from the in vitro studies that the gene mutations identified from the CRISPR screen analysis are either causative or associative with an increased itraconazole sensitivity phenotype.

[0117] In further in vitro studies of cancer cell lines not having gene mutations identified by the CRISPR screen analysis, it has been observed that those cell lines have increased sensitivity to itraconazole when treated with a lysosomotropic agent such as tamoxifen, or a V-ATPase inhibitor such as Bafilomycin A or Concanamycin. This result is consistent with the finding from the clinical trial described herein.

[0118] Without wanting to be bound by hypothesis, taken together, the data presented herein suggest that the gene mutations observed in the CRISPR screen analysis imbue cancer cells having those mutations with sub optimal or no lysosome function. This is observed herein histologically as an induction of lysosomal enlargement, lysosomal dysfunction and lysosomal stress response. The result of sub optimal or no lysosome function may be to increase the sensitivity of those cancer cells having those mutations to itraconazole.

[0119] Collectively, the data presented herein strongly indicates that the gene mutations identified in the CRISPR screen analysis can be utilised as basis to select patients for administration with itraconazole, either as a mono therapy, or as a combination therapy for treatment of cancer, and in particular for treatment of a wide range of epithelial cancers or carcinomas.

### 1. DEFINITIONS

[0120] For purposes of interpreting this specification, the following definitions will apply and whenever appropriate, terms used in the singular will also include the plural and vice versa.

[0121] As used herein, the term “about” in relation to a numerical value x means +/−10%, unless the context dictates otherwise.

[0122] “Itraconazole” is a common name for a triazole antifungal compound, the specific chemical structure and IUPAC name of which are well known in the art. It is available commercially (see Merck Index Reg. No. 5262 (12^{th} ed. 1996) and U.S. Pat. No. 4,267,179). As used herein, “itraconazole” includes not only the chemical compound (free base form, also referred to as “free itraconazole”), but also all optical isomers, such as enantiomers, diastereomers, meso compounds, and the like, as well as pharmaceutically acceptable salts, solvates, and prodrugs (such as esters) thereof.

[0123] As used herein, ‘loss of function mutation’ and grammatical variants thereof generally refers to a mutation that causes a gene product encoded by, or transcribed from, or translated from the gene to have abnormal quantity and/or abnormal quality. A loss of function mutation may lead to production of an abnormal amount of a gene product, for example an abnormally high, or an abnormally low amount of gene product, or no gene product at all. In one embodiment, the presence of a loss of function mutation may be assessed by determining whether in a subject cancer cell there is reduced or no production of the relevant gene product, such as a protein or RNA. In this embodiment where reduced or no production of the relevant gene product in the subject cancer cell is detected, this determines that the loss of function mutation is present. A loss of function mutation may lead to production of a gene product that has sub-optimal function, or no function, when compared to the function of wild type or normal gene product.

[0124] As used herein ‘lysosomotropic compound’ generally refers to a pharmaceutical compound that targets lysosomes or otherwise accumulates in lysosomes, usually as a result of a positive charge on the lysosomotropic compound. Examples of lysosomotropic compounds include V-ATPase inhibitor compounds.

[0125] As used herein, ‘synergistically effective amounts’, for example with reference to a combination of compound A and compound B, refers to an amounts of compound A and compound B that provide for a therapeutic effect that is greater than the sum of the effect of compound A when administered alone and compound B when administered alone.

[0126] As used herein, the term “pharmaceutically acceptable” means a nontoxic material that does not interfere with the effectiveness of the biological activity of the active ingredient(s).

[0127] As used herein, the term “treat”, “treating” or “treatment” in connection to a disease or disorder refers in one embodiment, to ameliorating the disease or disorder (i.e., slowing or arresting or reducing the development of the disease or at least one of the clinical symptoms thereof). In another embodiment “treat”, “treating” or “treatment” refers to alleviating or ameliorating at least one physical parameter including those which may not be discernible by the patient. In yet another embodiment, “treat”, “treating” or “treatment” refers to modulating the disease or disorder, either physically, {e.g., stabilization of a discernible symptom), physiologically, {e.g., stabilization of a physical parameter), or both. The term “alleviating” or “alleviation”, for example in reference to a symptom of a condition, as used herein, refers to reducing at least one of the frequency and amplitude of a symptom of a condition in a patient. In one embodiment, the terms “method for the treatment” or “method for treating”, as used herein, refer to “method to treat”.

[0128] As used herein, the term “therapeutically effective amount” refers to an amount of the compound of the invention, e.g. itraconazole; which is sufficient to achieve the stated effect. Accordingly, a therapeutically effective amount of itraconazole; will be an amount sufficient for the treatment or prevention of cancer.

[0129] By “therapeutic regimen” is meant the pattern of treatment of an illness, e.g., the pattern of dosing used during the treatment of the disease or disorder.

[0130] As used herein, a subject is “in need of” a treatment if such subject would benefit biologically, medically or in quality of life from such treatment.

### 2. DETAILED DESCRIPTION OF THE FIGURES

[0131] FIGS. 1A-C. FIG. 1A) Activity area analysis showing the activity of Itraconazole (Itra) in panel of 28 ovarian cancer cell lines. Cells were treated for 5 days with 0-40 μM Itra. FIG. 1B) Left, schematic representation of Itra chemogenetic CRISPR screen. Right, graphs showing DrugZ-calculated normZ score in OVCAR5 and TOV1946 cells. Synergistic/synthetic lethal interactions are reported in red at FDR and p value<0.05. FIG. 1C) Left-middle, Venn diagram showing overlap between the top hits from OVCAR5 and TOV1946 CRISPR screens and table showing common hits. Right, bioinformatic analysis showing pathways involved in the regulation of Itra sensitivity using Patdiph annotated database.

[0132] FIGS. 2A-2C. Graphs showing Alamar blue results on cells treated with Itra at a concentration of 0-40 μM for 5 days.

[0133] FIGS. 3A-C. FIG. 3A) Western blotting analysis showing Cas9 expression in stable TOV1946 and OVCAR5 cells overexpressing Cas9. B-tubulin and elF4E were used as loading controls. Alamar blue results showing Cas9 activity in Cas9 overexpressing cells infected to express sgRNA targeting LacZ (control condition) or the proteasomal subunits PSMD1 and PSMD2 previously reported to be essential genes. 2 different sgRNA were used for PSMD1 and PSMD2. FIG. 3B) Alalmar blue results showing Itra activity in OVCAR5 and TOV1946 overexpressing Cas9. FIG. 3C) Representative pictures of cells treated in the same conditions as FIG. 3A).

[0134] FIGS. 4A-I. FIG. 4A) Sequencing results and alignment of PCR amplicons reporting a homozygous deletion in the exon2 of c18orf gene upstream the AGG PAM sequence (reported in green). H1 represent a c18orf8 knockout cell line. FIG. 4B) Alamar blue results showing increased sensitivity to Itra in c18orf8 knockout cells compared to control. FIG. 4C) Protein translation wild type (top) versus knockout (bottom) c18orf8 resulting from OVCAR5 H1. The bottom protein sequence showed the insertion of a premature stop codon. FIGS. 4D-E) LAMP1 and Rab7 staining of wild type and c18orf8 knockout cells. Higher magnification is reported on the right. FIG. 4F) Western blotting analysis showing knockout of VPS54 in 3 independent clones of OVCAR5. B-tubulin and EIF4E were used as a loading control. FIG. 4G) FILIPIN staining showing cholesterol accumulation in VPS54 knockout cells compared to controls. FIG. 4H) Alamar blue results showing increased sensitivity to Itra in VPS54 knockout cells compared to controls. FIG. 4I) LAMP1 and Rab7 staining of wild type and VPS54 knockout cells. Higher magnification is reported on the right.

[0135] FIGS. 5A-B. FIG. 5A) Heat maps showing inhibitory effect of Itra alone (0-40 μM) or in combination with CQ (5-10 μM) in a panel of 28 ovarian cancer cell lines. FIG. 5B) Waterfall plot showing the synergy scores calculated using a Bliss independence model of combinations of Itra and CQ. Synergy score values are ranked from resistant to sensitive cells.

[0136] FIGS. 6A-6C. Alamar blue results showing the activity of Itra alone (black, 0-40 μM), or in combination with CQ 5 μM (red) and 10 μM (blue).

[0137] FIGS. 7A-7C. Alamar blue results showing the activity CQ 5 μM and 10 μM.

[0138] FIGS. 8A-8C. Synergy heat maps obtained using Synergy finder 2.0 software of cells treated in the same conditions as FIG. 5A-B. Itra-CQ synergy scores for each cell line are reported in FIG. 5B.

[0139] FIG. 9. Representative pictures (top) and quantification (bottom) of apoptotic rate in OVCAR5 cells treated with different combinations of Itra and CQ.

[0140] FIGS. 10A-C. FIG. 10A) and FIG. 10B) Alamar blue results and synergy heat maps of cells treated with Itra alone (black, 0-40 μM), or in combination with CQ 5 μM (red) and 10 μM (blue). FIG. 10C) Graph showing the Itra/CQ synergy score of three independent experiments of control cells (wt and wt #27), c18orf8 KO (#H1) and VPS54 KO (#14,23,24).

[0141] FIGS. 11A-B. FIG. 11A) Top, analysis of lysosomal pattern by LAMP1 immunofluorescence and relative quantification in TOV21g treated with Itra 5 μM (15)+/−CQ 5 μM (CQ5). Bottom, Analysis of lysosomal function and relative quantification in TOV21g treated as above. FIG. 11B) Analysis and quantification of TFEB nuclear translocation in TOV1946 stably expressing GFP conjugated TFEB and treated with Itra 5 μM (5) +/−CQ 10 μM (CQ10).

[0142] FIGS. 12A-D. FIG. 12A) Swimmer plot showing progression free survival (PFS) in patient enrolled in the HYDRA clinical trial. Different dose levels are reported in green (DL1), Orange (DL2) and blue (DL3). Different types of tumour are labeled with a triangle (low grade serous carcinoma) or a square (High grade serous carcinoma). FIG. 12B) Graph showing change from baseline in tumour size in HYDRA patients. FIGS. 12C-D) Chromatograms showing intra-tumour detection and quantification of Itra (left) and CQ (right) in HYDRA patients pre- and on treatment. Measurements were done using HPLC-MS/MS method. Specific peaks showing retention time for Itra (1.68 minutes) and CQ (0.95 min) are indicated in the m/z graphs reporting analysis in patient HYDRA-005.

[0143] FIGS. 13A-B. FIG. 13A) graphs showing immunohistochemistry quantification of cleaved caspase 3 (CC3), p62 and LAMP1 in HYDRA patients slides pre- and on treatment. FIG. 13B) Representative pictures of IHC staining (Hematoxylin-Eosin (HE), CC3, p62 and LAMP1) in patient HYDRA-005 pre and post treatment.

[0144] FIG. 14. Tissue heat map obtained using Aperio ImageScope showing treatment induced increased intensity of CC3, p62 and LAMP1 in patient HYDRA-005.

[0145] FIGS. 15A-B. FIG. 15A) Phase I rolling six study design. EOC: Epithelial ovarian cancer. DL: Dose-Level. MTD: Maximum tolerated toxicity. DLT: Dose limiting toxicity. RP2D: Recommended phase II dose. FIG. 15B) Quantification of Ki-67 staining in HYDRA patients pre- and on treatment (graphs on the left) and representative picture (right) of patient HYDRA-005.

[0146] FIGS. 16A-B: Summary of all adverse events and treatment related adverse events.

[0147] FIG. 17: DrugZ analysis showing ranking of GARP subunits VPS51, VPS52, VPS53 and VPS54 in TOV1946 and OVCAR5.

### 3. MODES OF CARRYING OUT THE INVENTION

[0148] The various embodiments described below will be understood to be applicable to carrying out the invention of the methods and enumerated embodiments described above.

[0149] As described herein, the invention relates to methods for assessing individuals to determine whether they have, or are at risk of cancer that is sensitive to itraconazole therapy whether given as a monotherapy or combination therapy, and for treating said individuals with itraconazole.

[0150] 3.1 Biomarkers for Selection/Identification of Individuals Having Itraconazole-Sensitive Cancer

[0151] The invention utilises biomarkers in the form of mutations, especially loss of function mutations of genes listed in Table 1 for the purpose assessing individuals to determine whether they have, or are at risk of having cancer that is sensitive to itraconazole therapy whether given as a monotherapy or combination therapy, and for treating said individuals with itraconazole.

[0152] Table 1 refers to a genomic sequence for each biomarker. Each of the genomic sequences referred to in Table 1 defines a biomarker having a normal function.

[0153] In embodiments of the invention, a cancer cell that contains all of the genomic sequences in Table 1 has a lower likelihood of sensitivity to itraconazole treatment.

[0154] In embodiments of the invention, a cancer cell that contains a mutant form of one or more genomic sequences in Table 1, in particular a mutant form comprising a loss of function mutation, and therefore that contains fewer than all of the genomic sequences in Table 1, has a higher likelihood of sensitivity to itraconazole treatment. Such a cancer cell may have reduced production of a protein or RNA encoded by a genomic sequence in Table 1.

TABLE 1

| | GENE | | SEQ ID | | | |
|---|---|---|---|---|---|---|
| Gene | ID | Accession no. | No. | GO - Biological process | Pathway/function | ALIASES |
| NBEAL1 | 65065 | NC_000002.12: | 1 | protein localization | Control of SREBP2 | A530083I02Rik, |
| | | 203013784- | | | processing and cholesterol | ALS2CR16, |
| | | 203225194 | | | metabolism | ALS2CR17 |
| C18orf8 | 29919 | NC_000018.10: | 2 | autophagy, regulation of | Componement of the CCZ1- | RMC1; MIC1; |
| | | 23503470- | | autophagy | MON1 RAB7A guanine | Mic-1; |
| | | 23531822 | | | exchange factor (GEF). Acts | WDR98; |
| | | | | | as a positive regulator of | HsT2591 |
| | | | | | CCZ1-MON1A/B function | |
| | | | | | necessary for | |
| | | | | | endosomal/autophagic flux | |
| | | | | | and efficient RAB7A | |
| | | | | | localization | |
| COG6 | 57511 | NC_000013.11: | 3 | endoplasmic reticulum | This gene encodes a subunit | COD2; SHNS; |
| | | 39655627- | | to Golgi vesicle- | of the conserved oligomeric | CDG2L |
| | | 39791666 | | mediated transport, | Golgi complex that is required | |
| | | | | glycosylation, intra-Golgi | for maintaining normal | |
| | | | | vesicle-mediated | structure and activity of the | |
| | | | | transport, protein | Golgi apparatus. The encoded | |
| | | | | transport | protein is organized with | |
| | | | | | conserved oligomeric Golgi | |
| | | | | | complex components 5, 7 and | |
| | | | | | 8 into a sub-complex referred | |
| | | | | | to as lobe B. Alternative | |
| | | | | | splicing results in multiple | |
| | | | | | transcript variants. [provided | |
| | | | | | by RefSeq, February 2009] | |
| SLC30A9 | 10463 | NC_ 000004.12: | 4 | Ion transport, | Acts as a zinc transporter | HUEL; ZNT9; |
| | | 41990502- | | Transcription, | involved in intracellular zinc | GAC63; |
| | | 42090461 | | Transcription regulation, | homeostasis | C4orf1; |
| | | | | Transport, Zinc transport | (PubMed: 28334855). | BILAPES |
| | | | | | Functions as a secondary | |
| | | | | | coactivator for nuclear | |
| | | | | | receptors by cooperating with | |
| | | | | | p160 coactivators subtypes. | |
| | | | | | Plays a role in transcriptional | |
| | | | | | activation of Wnt-responsive | |
| | | | | | genes (By similarity). | |
| ARL1 | 400 | NC_000012.12: | 5 | activation of | GTP-binding protein that | ARFL1 |
| | | c101407820- | | phospholipase D | recruits several effectors, such | |
| | | 101393116 | | activity, Golgi | as golgins, arfaptins and Arf- | |
| | | | | organization, | GEFs to the trans-Golgi | |
| | | | | intracellular protein | network, and modulates their | |
| | | | | transport, protein | functions at the Golgi complex | |
| | | | | localization to Golgi | (PubMed: 9624189, | |
| | | | | apparatus, retrograde | PubMed: 21239483, | |
| | | | | transport, endosome to | PubMed: 27436755, | |
| | | | | Golgi, toxin metabolic | PubMed: 22679020, | |
| | | | | process, vesicle- | PubMed: 27373159). Plays | |
| | | | | mediated transport | thereby a role in a wide range | |
| | | | | | of fundamental cellular | |
| | | | | | processes, including cell | |
| | | | | | polarity, innate immunity, or | |
| | | | | | protein secretion mediated by | |
| | | | | | arfaptins, which were shown to | |
| | | | | | play a role in maintaining | |
| | | | | | insulin secretion from | |
| | | | | | pancreatic beta cells | |
| | | | | | (PubMed: 22981988). | |
| UNC50 | 25972 | NC_000002.12: | 6 | Protein transport, | May be involved in cell surface | URP; GMH1; |
| | | 98608589- | | Transport | expression of neuronal | UNCL; |
| | | 98618515 | | | nicotinic receptors. Binds RNA | HSD23; |
| | | | | | (By similarity). | PDLs22 |
| EPT1 | 85465 | NC_000002.12: | 7 | phosphatidylethanolamine | Ethanolaminephosphotransferase | SELENOI, |
| | | 26346143- | | biosynthetic process, | that catalyzes the transfer | SELI; SEPI; |
| | | 26395885 | | Lipid biosynthesis, Lipid | of phosphoethanolamine/PE | SPG81 |
| | | | | metabolism, | from CDP-ethanolamine to | |
| | | | | Phospholipid | lipid acceptors, the final step in | |
| | | | | biosynthesis, | the synthesis of PE via the | |
| | | | | Phospholipid | ‘Kennedy’ pathway | |
| | | | | metabolism | (PubMed: 17132865, | |
| | | | | | PubMed: 28052917, | |
| | | | | | PubMed: 29500230). PE is the | |
| | | | | | second most abundant | |
| | | | | | phospholipid of membranes in | |
| | | | | | mammals and is involved in | |
| | | | | | various membrane-related | |
| | | | | | cellular processes | |
| | | | | | (PubMed: 17132865). The | |
| | | | | | enzyme is critical for the | |
| | | | | | synthesis of several PE | |
| | | | | | species and could also | |
| | | | | | catalyze the synthesis of | |
| | | | | | ether-linked phospholipids like | |
| | | | | | plasmanyl- and plasmenyl-PE | |
| | | | | | which could explain it is | |
| | | | | | required for proper myelination | |
| | | | | | and neurodevelopment | |
| | | | | | (PubMed: 29500230). | |
| RTN4IP1 | 84816 | NC_000006.12: | 8 | nervous system | Plays a role in the regulation of | NIMP; OPA10 |
| | | c106630921- | | development, regulation | retinal ganglion cell (RGC) | |
| | | 106559237 | | of dendrite development | neurite outgrowth, and hence | |
| | | | | | in the development of the inner | |
| | | | | | retina and optic nerve. | |
| | | | | | Appears to be a potent | |
| | | | | | inhibitor of regeneration | |
| | | | | | following spinal cord injury. | |
| SPTLC2 | 9517 | NC_000014.9: | 9 | Lipid metabolism, | Serine palmitoyltransferase | LCB2; SPT2; |
| | | c77616663- | | Sphingolipid metabolism | (SPT). The heterodimer | HSN1C; |
| | | 77505997 | | | formed with LCB1/SPTLC1 | LCB2A; |
| | | | | | constitutes the catalytic core. | NSAN1C; |
| | | | | | The composition of the serine | hLCB2a |
| | | | | | palmitoyltransferase (SPT) | |
| | | | | | complex determines the | |
| | | | | | substrate preference. The | |
| | | | | | SPTLC1-SPTLC2-SPTSSA | |
| | | | | | complex shows a strong | |
| | | | | | preference for C16-CoA | |
| | | | | | substrate, while the SPTLC1- | |
| | | | | | SPTLC2-SPTSSB complex | |
| | | | | | displays a preference for C18- | |
| | | | | | CoA substrate. Plays an | |
| | | | | | important role in de novo | |
| | | | | | sphyngolipid biosynthesis | |
| | | | | | which is crucial for | |
| | | | | | adipogenesis (By similarity). | |
| SEC14L1 | 6397 | NC_000017.11: | 10 | Immunity, Innate | May play a role in innate | SEC14L; |
| | | 77088685- | | immunity | immunity by inhibiting the | PRELID4A |
| | | 77217101 | | | antiviral RIG-I signaling | |
| | | | | | pathway. In this pathway, | |
| | | | | | functions as a negative | |
| | | | | | regulator of DDX58/RIG-I, the | |
| | | | | | cytoplasmic sensor of viral | |
| | | | | | nucleic acids. Prevents the | |
| | | | | | interaction of DDX58 with | |
| | | | | | MAVS/IPS1, an important step | |
| | | | | | in signal propagation | |
| | | | | | (PubMed: 23843640). May | |
| | | | | | also regulate the SLC18A3 | |
| | | | | | and SLC5A7 cholinergic | |
| | | | | | transporters | |
| | | | | | (PubMed: 17092608). | |
| CCDC22 | 28952 | NC_000023.11: | 11 | cellular copper ion | Involved in regulation of NF- | JM1; RTSC2; |
| | | 49235470- | | homeostasis, | kappa-B signaling. Promotes | CXorf37 |
| | | 49250526 | | cytoplasmic | ubiquitination of I-kappa-B- | |
| | | | | sequestering of NF- | kinase subunit IKBKB and its | |
| | | | | kappaB, endocytic | subsequent proteasomal | |
| | | | | recycling, Golgi to | degradation leading to NF- | |
| | | | | plasma membrane | kappa-B activation; the | |
| | | | | transport, negative | function may involve | |
| | | | | regulation of I-kappaB | association with COMMD8 | |
| | | | | kinase/NF-kappaB | and a CUL1-dependent E3 | |
| | | | | signaling, positive | ubiquitin ligase complex. May | |
| | | | | regulation of I-kappaB | down-regulate NF-kappa-B | |
| | | | | kinase/NF-kappaB | activity via association with | |
| | | | | signaling, positive | COMMD1 and involving a | |
| | | | | regulation of ubiquitin- | CUL2-dependent E3 ubiquitin | |
| | | | | dependent protein | ligase complex. Regulates the | |
| | | | | catabolic process, post- | cellular localization of COMM | |
| | | | | translational protein | domain-containing proteins, | |
| | | | | modification, protein | such as COMMD1 and | |
| | | | | transport, protein | COMMD10 | |
| | | | | ubiquitination, | (PubMed: 23563313). | |
| | | | | retrograde transport, | Component of the CCC | |
| | | | | endosome to plasma | complex, which is involved in | |
| | | | | membrane | the regulation of endosomal | |
| | | | | | recycling of surface proteins, | |
| | | | | | including integrins, signaling | |
| | | | | | receptor and channels. The | |
| | | | | | CCC complex associates with | |
| | | | | | SNX17, retriever and WASH | |
| | | | | | complexes to prevent | |
| | | | | | lysosomal degradation and | |
| | | | | | promote cell surface recycling | |
| | | | | | of numerous cargos such as | |
| | | | | | integrins ITGA5: ITGB1 | |
| | | | | | (PubMed: 28892079, | |
| | | | | | PubMed: 25355947). Plays a | |
| | | | | | role in copper ion | |
| | | | | | homeostasis. Involved in | |
| | | | | | copper-dependent ATP7A | |
| | | | | | trafficking between the trans- | |
| | | | | | Golgi network and vesicles in | |
| | | | | | the cell periphery; the function | |
| | | | | | is proposed to depend on its | |
| | | | | | association within the CCC | |
| | | | | | complex and cooperation with | |
| | | | | | the WASH complex on early | |
| | | | | | endosomes | |
| | | | | | (PubMed: 25355947). | |
| SPTSSA | 171546 | NC_000014.9: | 12 | Lipid metabolism, | Stimulates the activity of | SSSPTA; |
| | | c34462240- | | Sphingolipid metabolism | serine palmitoyltransferase | C14orf147 |
| | | 34432788 | | | (SPT). The composition of the | |
| | | | | | serine palmitoyltransferase | |
| | | | | | (SPT) complex determines the | |
| | | | | | substrate preference. The | |
| | | | | | SPTLC1-SPTLC2-SPTSSA | |
| | | | | | complex shows a strong | |
| | | | | | preference for C16-CoA | |
| | | | | | substrate, while the SPTLC1- | |
| | | | | | SPTLC3-SPTSSA isozyme | |
| | | | | | uses both C14-CoA and C16- | |
| | | | | | CoA as substrates, with a | |
| | | | | | slight preference for C14-CoA | |
| | | | | | (PubMed: 19416851). Plays a | |
| | | | | | role in MBOAT7 location to | |
| | | | | | mitochondria-associated | |
| | | | | | membranes (MAMs), may me | |
| | | | | | involved in fatty acid | |
| | | | | | remodeling | |
| | | | | | phosphatidylinositol (PI) | |
| | | | | | (PubMed: 23510452). | |
| KIAA1033 | 23325 | NC_000012.12: | 13 | endosomal transport, | Acts as a component of the | WASHC4; |
| | | 105107726- | | endosome organization, | WASH core complex that | SWIP; MRT43 |
| | | 105169134 | | protein transport | functions as a nucleation- | |
| | | | | | promoting factor (NPF) at the | |
| | | | | | surface of endosomes, where | |
| | | | | | it recruits and activates the | |
| | | | | | Arp2/3 complex to induce actin | |
| | | | | | polymerization, playing a key | |
| | | | | | role in the fission of tubules | |
| | | | | | that serve as transport | |
| | | | | | intermediates during | |
| | | | | | endosome sorting. | |
| SPTLC1 | 10558 | NC_000009.12: | 14 | Lipid metabolism, | Serine palmitoyltransferase | HSN1; LBC1; |
| | | c92115413- | | Sphingolipid metabolism | (SPT) (PubMed: 19416851). | LCB1; SPT1; |
| | | 92031141 | | | The heterodimer formed with | SPTI; HSAN1 |
| | | | | | SPTLC2 or SPTLC3 | |
| | | | | | constitutes the catalytic core | |
| | | | | | (PubMed: 19416851). The | |
| | | | | | composition of the serine | |
| | | | | | palmitoyltransferase (SPT) | |
| | | | | | complex determines the | |
| | | | | | substrate preference | |
| | | | | | (PubMed: 19416851). The | |
| | | | | | SPTLC1-SPTLC2-SPTSSA | |
| | | | | | complex shows a strong | |
| | | | | | preference for C16-CoA | |
| | | | | | substrate, while the SPTLC1- | |
| | | | | | SPTLC3-SPTSSA isozyme | |
| | | | | | uses both C14-CoA and C16- | |
| | | | | | CoA as substrates, with a | |
| | | | | | slight preference for C14-CoA | |
| | | | | | (PubMed: 19416851). The | |
| | | | | | SPTLC1-SPTLC2-SPTSSB | |
| | | | | | complex shows a strong | |
| | | | | | preference for C18-CoA | |
| | | | | | substrate, while the SPTLC1- | |
| | | | | | SPTLC3-SPTSSB isozyme | |
| | | | | | displays an ability to use a | |
| | | | | | broader range of acyl-CoAs, | |
| | | | | | without apparent preference | |
| | | | | | (PubMed: 19416851). | |
| | | | | | Required for adipocyte cell | |
| | | | | | viability and metabolic | |
| | | | | | homeostasis (By similarity) | |
| VPS54 | 51542 | NC 000002.12: | 15 | Golgi to vacuole | cts as component of the GARP | WR; HCC8; |
| | | c64019428- | | transport, homeostasis | complex that is involved in | SLP-8p; |
| | | 63892149 | | of number of cells within | retrograde transport from early | VPS54L; |
| | | | | a tissue, lysosomal | and late endosomes to the | hVps54L; |
| | | | | transport, | trans-Golgi network (TGN). | PPP1R164 |
| | | | | musculoskeletal | The GARP complex is | |
| | | | | movement, | required for the maintenance | |
| | | | | neurofilament | of the cycling of mannose 6- | |
| | | | | cytoskeleton | phosphate receptors between | |
| | | | | organization, protein | the TGN and endosomes, this | |
| | | | | transport, regulation of | cycling is necessary for proper | |
| | | | | growth, retrograde | lysosomal sorting of acid | |
| | | | | transport, endosome to | hydrolases such as CTSD | |
| | | | | Golgi | (PubMed: 18367545). Within | |
| | | | | | the GARP complex, required | |
| | | | | | to tether the complex to the | |
| | | | | | TGN. Not involved in | |
| | | | | | endocytic recycling | |
| | | | | | (PubMed: 25799061). | |
| TSSC1 | 7260 | NC_000002.12: | 16 | endocytic recycling, | Acts as a component of | EIPR1; |
| | | c3377818- | | positive regulation of | endosomal retrieval | EIPR-1 |
| | | 3188968 | | endocytic recycling, | machinery that is involved in | |
| | | | | positive regulation of | protein transport from early | |
| | | | | retrograde transport, | endosomes to either recycling | |
| | | | | endosome to Golgi, | endosomes or the trans-Golgi | |
| | | | | protein ubiquitination, | network (PubMed: 27440922). | |
| | | | | regulation of insulin | Mediates the recruitment of | |
| | | | | secretion | Golgi-associated retrograde | |
| | | | | | protein (GARP) complex to the | |
| | | | | | trans-Golgi network and | |
| | | | | | controls early endosome-to- | |
| | | | | | Golgi transport of internalized | |
| | | | | | protein(PubMed: 27440922). | |
| | | | | | Promotes the recycling of | |
| | | | | | internalized transferrin | |
| | | | | | receptor (TFRC) to the plasma | |
| | | | | | membrane through interaction | |
| | | | | | with endosome-associated | |
| | | | | | recycling protein (EARP) | |
| | | | | | complex (PubMed: 27440922). | |
| | | | | | Controls proper insulin | |
| | | | | | distribution and secretion, and | |
| | | | | | retention of cargo in mature | |
| | | | | | dense core vesicles (By | |
| | | | | | similarity). Required for the | |
| | | | | | stability of the endosome- | |
| | | | | | associated retrograde protein | |
| | | | | | (EARP) complex subunits and | |
| | | | | | for proper localization and | |
| | | | | | association of EARP with | |
| | | | | | membranes (By similarity). | |
| KIF11 | 3832 | NC_000010.11: | 17 | antigen processing and | Motor protein required for | EG5; HKSP; |
| | | 92593130- | | presentation of | establishing a bipolar spindle | KNSL1; |
| | | 92655395 | | exogenous peptide | during mitosis | MCLMR; |
| | | | | antigen via MHC class II, | (PubMed: 19001501). | TRIP5 |
| | | | | cell division, | Required in non-mitotic cells | |
| | | | | microtubule-based | for transport of secretory | |
| | | | | movement, mitotic cell | proteins from the Golgi | |
| | | | | cycle, mitotic | complex to the cell surface | |
| | | | | centrosome separation, | (PubMed: 23857769). | |
| | | | | mitotic spindle | | |
| | | | | assembly, mitotic | | |
| | | | | spindle organization, | | |
| | | | | regulation of mitotic | | |
| | | | | centrosome separation, | | |
| | | | | retrograde vesicle- | | |
| | | | | mediated transport, | | |
| | | | | Golgi to endoplasmic | | |
| | | | | reticulum, spindle | | |
| | | | | organization | | |
| NDUFS4 | 4724 | NC_000005.10: | 18 | Electron transport, | Accessory subunit of the | AQDQ; CI-18; |
| | | 53560610- | | Respiratory chain, | mitochondrial membrane | MC1DN1; CI- |
| | | 53683338 | | Transport | respiratory chain NADH | AQDQ; CI-18 |
| | | | | | dehydrogenase (Complex I), | kDa |
| | | | | | that is believed not to be | |
| | | | | | involved in catalysis. Complex | |
| | | | | | I functions in the transfer of | |
| | | | | | electrons from NADH to the | |
| | | | | | respiratory chain. The | |
| | | | | | immediate electron acceptor | |
| | | | | | for the enzyme is believed to | |
| | | | | | be ubiquinone. | |
| COMMD4 | 54939 | NC_000015.10: | 19 | Transcription, | May modulate activity of cullin- | |
| | | 75336035- | | Transcription | RING E3 ubiquitin ligase | |
| | | 75343227 | | regulation, Ubl | (CRL) complexes | |
| | | | | conjugation pathway | (PubMed: 21778237). Down- | |
| | | | | | regulates activation of NF- | |
| | | | | | kappa-B. | |
| COL4A3BP | 10087 | NC_000005.10: | 20 | Lipid transport, | Shelters ceramides and | CERT1; |
| | | c75511981- | | Transport | diacylglycerol lipids inside its | CERT; GPBP; |
| | | 75368486 | | | START domain and mediates | CERTL; |
| | | | | | the intracellular trafficking of | MRD34; |
| | | | | | ceramides and diacylglycerol | STARD11 |
| | | | | | lipids in a non-vesicular | |
| | | | | | manner. | |
| VPS51 | 738 | NC_000011.10: | 21 | autophagy, brain | Acts as component of the | FFR; ANG2; |
| | | 65096214- | | morphogenesis, | GARP complex that is | ANG3; |
| | | 65111862 | | endocytic recycling, | involved in retrograde | PCH13; |
| | | | | Golgi organization, | transport from early and late | C11orf2; |
| | | | | Golgi vesicle transport, | endosomes to the trans-Golgi | C11orf3 |
| | | | | lipid transport, | network (TGN). The GARP | |
| | | | | lysosomal transport, | complex is required for the | |
| | | | | protein transport, | maintenance of protein | |
| | | | | retrograde transport, | retrieval from endosomes to | |
| | | | | endosome to Golgi | the TGN, acid hydrolase | |
| | | | | | sorting, lysosome function, | |
| | | | | | endosomal cholesterol traffic | |
| | | | | | and autophagy. VPS51 | |
| | | | | | participates in retrograde | |
| | | | | | transport of acid hydrolase | |
| | | | | | receptors, likely by promoting | |
| | | | | | tethering and SNARE- | |
| | | | | | dependent fusion of | |
| | | | | | endosome-derived carriers to | |
| | | | | | the TGN | |
| | | | | | (PubMed: 20685960). Acts as | |
| | | | | | component of the EARP | |
| | | | | | complex that is involved in | |
| | | | | | endocytic recycling. The | |
| | | | | | EARP complex associates | |
| | | | | | with Rab4-positive | |
| | | | | | endosomes and promotes | |
| | | | | | recycling of internalized | |
| | | | | | transferrin receptor (TFRC) to | |
| | | | | | the plasma membrane | |
| | | | | | (PubMed: 25799061). | |
| VPS52 | 6293 | NC_000006.12: | 22 | ectodermal cell | Acts as component of the | ARE1; SAC2; |
| | | c33271965- | | differentiation, | GARP complex that is | SACM2L; |
| | | 33250272 | | embryonic ectodermal | involved in retrograde | dJ1033B10.5 |
| | | | | digestive tract | transport from early and late | |
| | | | | development, endocytic | endosomes to the trans-Golgi | |
| | | | | recycling, Golgi to | network (TGN). The GARP | |
| | | | | vacuole transport, | complex is required for the | |
| | | | | lysosomal transport, | maintenance of the cycling of | |
| | | | | protein transport, | mannose 6-phosphate | |
| | | | | retrograde transport, | receptors between the TGN | |
| | | | | endosome to Golgi | and endosomes, this cycling | |
| | | | | | is necessary for proper | |
| | | | | | lysosomal sorting of acid | |
| | | | | | hydrolases such as CTSD | |
| | | | | | (PubMed: 15878329, | |
| | | | | | PubMed: 18367545). Acts as | |
| | | | | | component of the EARP | |
| | | | | | complex that is involved in | |
| | | | | | endocytic recycling. The | |
| | | | | | EARP complex associates | |
| | | | | | with Rab4-positive | |
| | | | | | endosomes and promotes | |
| | | | | | recycling of internalized | |
| | | | | | transferrin receptor (TFRC) to | |
| | | | | | the plasma membrane | |
| | | | | | (PubMed: 25799061). | |
| VPS53 | 55275 | NC_000017.11: | 23 | endocytic recycling, | Acts as component of the | HCCS1; |
| | | c714846-508668 | | lysosomal transport, | GARP complex that is | PCH2E; |
| | | | | protein transport, | involved in retrograde | hVps53L; |
| | | | | retrograde transport, | transport from early and late | pp13624 |
| | | | | endosome to Golgi | endosomes to the trans-Golgi | |
| | | | | | network (TGN). The GARP | |
| | | | | | complex is required for the | |
| | | | | | maintenance of the cycling of | |
| | | | | | mannose 6-phosphate | |
| | | | | | receptors between the TGN | |
| | | | | | and endosomes, this cycling | |
| | | | | | is necessary for proper | |
| | | | | | lysosomal sorting of acid | |
| | | | | | hydrolases such as CTSD | |
| | | | | | (PubMed: 15878329, | |
| | | | | | PubMed: 18367545). Acts as | |
| | | | | | component of the EARP | |
| | | | | | complex that is involved in | |
| | | | | | endocytic recycling. The | |
| | | | | | EARP complex associates | |
| | | | | | with Rab4-positive | |
| | | | | | endosomes and promotes | |
| | | | | | recycling of internalized | |
| | | | | | transferrin receptor (TFRC) to | |
| | | | | | the plasma membrane | |
| | | | | | (PubMed: 25799061). | |

[0155] In one embodiment the loss of function mutation is a deletion of all or part of an exon or intron or regulatory region of a gene listed in Table 1.

[0156] In one embodiment the loss of function mutation is an insertion of one or more nucleotides in an exon or intron or regulatory region of a gene listed in Table 1.

[0157] In one embodiment the loss of function mutation is a substitution of one or more nucleotides in an exon or intron or regulatory region of a gene listed in Table 1.

[0158] In one embodiment the loss of function mutation is a deletion event of chromosome comprising a gene listed in Table 1.

[0159] In one embodiment the loss of function mutation is a duplication event of a chromosome comprising a gene listed in Table 1.

[0160] In one embodiment the loss of function mutation is a inversion event of a chromosome comprising a gene listed in Table 1.

[0161] In one embodiment the loss of function mutation is an insertion event of a chromosome comprising a gene listed in Table 1.

[0162] In one embodiment the loss of function mutation is a translocation event of a chromosome comprising a gene listed in Table 1.

[0163] In one embodiment the loss of function mutation is a somatic mutation.

[0164] In one embodiment the loss of function mutation causes a frame shift mutation in a gene listed in Table 1.

[0165] In one embodiment the loss of function mutation creates a stop signal in a gene listed in Table 1.

[0166] In one embodiment, the loss of function mutation results in no production, or in reduced production of a gene product in the form of a protein or RNA encoded by a gene listed in Table 1.

[0167] In one embodiment the loss of function mutation leads to the production of a gene product, preferably a protein that has sub-optimal function, or no function, when compared to the function of a gene product encoded by a gene listed in Table 1.

[0168] 3.1.1 NBEAL1

[0169] In one embodiment, the mutation in NBEAL1 causes, or is associated with a defect in LDLR-mediated cholesterol uptake by the cancer cell as regulated by sterol regulatory element binding protein 2 (SREBP2), especially by minimising or precluding an interaction between NBEAL1 and sterol regulatory element binding protein cleavage activating protein (SOAP), or by minimising or precluding an interaction between NBEAL1 and adipoQ receptor family member 3 protein (PAQR).

[0170] In this embodiment the loss of function mutation may be a mutation of the NBEAL1 gene that leads to a reduction in production of a normal NBEAL1 protein, or no production of normal NBEAL1 protein at all.

[0171] A reduction in production of normal NBEAL1 protein in a cancer cell is likely to be associated with minimised interaction between NBEAL1 and SOAP, or NBEAL1 and PAQR, thereby leading to sub-optimal regulation of SREBP2 activity in mediating LDLR in cholesterol uptake. An absence of production of normal NBEAL1 protein in a cancer cell is likely to preclude interaction between NBEAL1 and SOAP, or NBEAL1 and PAQR thereby leaving SREBP2 activity unregulated by SOAP or PAQR.

[0172] A reduction or absence of production of normal NBEAL1 protein may be associated with production of NBEAL1 protein that is unable to functionally interact with SOAP or PAQR. Such an NBEAL1 protein may lack one or more functional domains required for SOAP or PAQR interaction. These NBEAL1 protein mutants may be detected by standard techniques.

[0173] A loss of function mutation may present as an absence of all or part of a genomic sequence for NBEAL as shown in Table 1, or an epigenetic change in a regulatory region of NBEAL1 gene that leads to decreased NBEAL1 gene expression. These mutation events may be detected by standard techniques as described further herein.

[0174] 3.1.2 C18orf8

[0175] In one embodiment the mutation in C18orf8 causes, or is associated with a defect in the lysosomal maturation, thereby inducing lysosomal enlargement and dysfunction and inhibiting autophagy in a cancer cell. The mutation may minimise or preclude an interaction between C18orf8 and components of the CCZ1-Mon1 complex. The CCZ1-Mon1 complex is required for recruitment of Rab7 at the LE/L lysosomes and for lysosomal maturation. The mutation in C18orf8 may minimise or preclude the interaction between these components and C18orf8 thereby preventing the formation of a functional CCZ1-Mon1 complex.

[0176] In this embodiment the loss of function mutation may be a mutation of the C18orf8 gene that leads to a reduction in production of a normal C18orf8 protein, or no production of normal C18orf8 protein at all.

[0177] A reduction in production of normal C18orf8 protein in a cancer cell is likely to be associated with minimised interaction between C18orf8 and components of the CCZ1-Mon1 complex, thereby leading to sub-optimal recruitment of Rab7 protein at LE/L lysosomes. An absence of production of normal C18orf8 protein in a cancer cell is likely to preclude interaction between C18orf8 and components of CCZ1-Mon1 thereby leaving sub-optimal or no CCZ-Mon1 function in the cancer cell.

[0178] A reduction or absence of production of normal C18orf8 protein may be associated with production of C18orf8 protein that is unable to functionally interact with components of CCZ1-Mon1. Such a C18orf8 protein may lack one or more functional domains required for CCZ1-Mon1 assembly. These C18orf8 protein mutants may be detected by standard techniques.

[0179] A loss of function mutation may present as an absence of all or part of a genomic sequence for C18orf8 as shown in Table 1, or an epigenetic change in a regulatory region of C18orf8 gene that leads to decreased C18orf8 gene expression. These mutation events may be detected by standard techniques as described further herein.

[0180] 3.1.3 COG6

[0181] In one embodiment the mutation in COG6 causes, or is associated with a defect in the ER to Golgi vehicle-mediated transport or intra-Golgi vehicle-mediated transport in the cancer cell especially by minimising or precluding an interaction between COG6 and Golgi complex components 5, 7, and 8, thereby preventing the formation of a functional lobe B subcomplex.

[0182] In this embodiment the loss of function mutation may be a mutation of the COG6 gene that leads to a reduction in production of a normal COG6 protein, or no production of normal COG6 protein at all.

[0183] A reduction in production of normal COG6 protein in a cancer cell is likely to be associated with minimised interaction between COG6 and the components of the functional lobe B subcomplex, thereby leading to sub-optimal intra Golgi and ER to Golgi transport of protein chains. An absence of production of normal COG6 protein in a cancer cell is likely to preclude interaction between COG6 and Golgi complex components 5, 7 and 8 thereby impairing transport from ER to Golgi and within the Golgi.

[0184] A reduction or absence of production of normal COG6 protein may be associated with production of COG6 protein that is unable to functionally interact with Golgi complex components 5, 7 and 8. Such an COG6 protein may lack one or more functional domains required for Golgi complex components 5, 7 and 8 interaction. These COG6 protein mutants may be detected by standard techniques.

[0185] A loss of function mutation may present as an absence of all or part of a genomic sequence for COG6 as shown in Table 1, or an epigenetic change in a regulatory region of COG6 gene that leads to decreased COG6 gene expression. These mutation events may be detected by standard techniques as described further herein.

[0186] 3.1.4 SLC30A9

[0187] A loss of function mutation may present as an absence of all or part of a genomic sequence for SLC30A9 as shown in Table 1, or an epigenetic change in a regulatory region of SLC30A9 gene that leads to decreased SLC30A9 gene expression. These mutation events may be detected by standard techniques as described further herein

[0188] 3.1.5 ARL1

[0189] A loss of function mutation may present as an absence of all or part of a genomic sequence for ARL1 as shown in Table 1, or an epigenetic change in a regulatory region of ARL1 gene that leads to decreased ARL1 gene expression. These mutation events may be detected by standard techniques as described further herein.

[0190] 3.1.6 UNC50

[0191] A loss of function mutation may present as an absence of all or part of a genomic sequence for UNC50 as shown in Table 1, or an epigenetic change in a regulatory region of UNC50 gene that leads to decreased UNC50 gene expression. These mutation events may be detected by standard techniques as described further herein.

[0192] 3.1.7 EPT1

[0193] In one embodiment the mutation in EPT1 causes, or is associated with a defect in phosphatidylethanolamine (PE) synthesis in a cancer cell by minimising or precluding the catalysis of transfer of PE to lipid acceptors.

[0194] In this embodiment the loss of function mutation may be a mutation of the EPT1 gene that leads to a reduction in production of a normal EPT1 protein, or no production of normal EPT1 protein at all.

[0195] A reduction in production of normal EPT1 protein in a cancer cell is likely to be associated with minimised transfer of PE to lipid acceptors, thereby leading to sub-optimal PE synthesis. An absence of production of normal EPT1 protein in a cancer cell is likely to require the cancer cell to source PE from other cellular compartments, thereby stressing the cancer cell.

[0196] A reduction or absence of production of normal EPT1 protein may be associated with production of EPT1 protein that is unable to catalyse the transfer of PE to lipid acceptor molecules. Such an EPT1 protein may lack one or more catalytic domains controlling PE transfer. These EPT1 protein mutants may be detected by standard techniques.

[0197] A loss of function mutation may present as an absence of all or part of a genomic sequence for EPT1 as shown in Table 1, or an epigenetic change in a regulatory region of EPT1 gene that leads to decreased EPT1 gene expression. These mutation events may be detected by standard techniques as described further herein.

[0198] 3.1.8 RTN4IP1

[0199] A loss of function mutation may present as an absence of all or part of a genomic sequence for RTN4IP1 as shown in Table 1, or an epigenetic change in a regulatory region of RTN4IP1 gene that leads to decreased RTN4IP1 gene expression. These mutation events may be detected by standard techniques as described further herein.

[0200] 3.1.9 SPTLC2

[0201] In one embodiment the mutation in SPTLC2 causes, or is associated with a defect in the lipid or sphinolipid pathway of the cancer cell as regulated by serine palmitoyltransferase activity arising from heterodimers containing SPTLC2, especially SPTLC1/SPLTC2.

[0202] The mutation may minimise or preclude an interaction between SPTLC1 and SPTLC2, or SPTLC2 and SPTSSA, or SPTLC2 and SPTSSB.

[0203] In this embodiment the loss of function mutation may be a mutation of the SPTLC2 gene that leads to a reduction in production of a normal SPTLC2 protein, or no production of normal SPTLC2 protein at all.

[0204] A reduction in production of normal SPTLC2 protein in a cancer cell is likely to be associated with minimised interaction between SPTLC2 and any one of SPTLC1, SPTSSA and SPTSSB, thereby leading to sub-optimal serine palmitoyltransferase activity. An absence of production of normal SPTLC2 protein in a cancer cell is likely to preclude interaction between between SPTLC2 and any one of SPTLC1, SPTSSA and SPTSSB thereby ostensibly ablating serine palmitoyltransferase activity in a cancer cell.

[0205] A reduction or absence of production of normal SPTLC2 protein may be associated with production of SPTLC2 protein that is unable to functionally interact with any one of SPTLC1, SPTSSA and SPTSSB. Such an SPTLC2 protein may lack one or more functional domains required for these interactions. These SPTLC2 protein mutants may be detected by standard techniques.

[0206] A loss of function mutation may present as an absence of all or part of a genomic sequence for SPTLC2 as shown in Table 1, or an epigenetic change in a regulatory region of SPTLC2 gene that leads to decreased SPTLC2 gene expression. These mutation events may be detected by standard techniques as described further herein.

[0207] 3.1.10 SEC14L1

[0208] A loss of function mutation may present as an absence of all or part of a genomic sequence for SEC14L1 as shown in Table 1, or an epigenetic change in a regulatory region of SEC14L1 gene that leads to decreased SEC14L1 gene expression. These mutation events may be detected by standard techniques as described further herein.

[0209] 3.1.11 CCDC22

[0210] In one embodiment the mutation in CCDC22 causes, or is associated with a defect in prevention of lysosomal degradation of cell surface proteins of the cancer cell as mediated by SNX17 and WASH complexes when CCDC22 is associated with CCD93 and COMMD proteins in a CCC complex.

[0211] The mutation in CCDC22 may minimise or preclude an interaction between CCDC22 and CCD93, or CCDC22 and COMMD proteins.

[0212] In this embodiment the loss of function mutation may be a mutation of the CCDC22 gene that leads to a reduction in production of a normal CCDC22 protein, or no production of normal CCDC22 protein at all.

[0213] A reduction in production of normal CCDC22 protein in a cancer cell is likely to be associated with minimised interaction between CCDC22 and CCD93, or CCDC22 and COMMD proteins, thereby leading to sub-optimal regulation of prevention of lysosomal degradation of cell surface proteins. An absence of production of normal CCDC22 protein in a cancer cell is likely to preclude interaction between CCDC22 and CCD93, or CCDC22 and COMMD proteins thereby leaving certain cell surface proteins of the cancer cell exposed to lysosomal degradation.

[0214] A reduction or absence of production of normal CCDC22 protein may be associated with production of CCDC22 protein that is unable to functionally interact with CCD93, or COMMD proteins. Such an CCDC22 protein may lack one or more functional domains required for CCD93 or COMMD proteins interaction for producing a functional CCC complex. These CCDC22 protein mutants may be detected by standard techniques.

[0215] A loss of function mutation may present as an absence of all or part of a genomic sequence for CCDC22 as shown in Table 1, or an epigenetic change in a regulatory region of CCDC22 gene that leads to decreased CCDC22 gene expression. These mutation events may be detected by standard techniques as described further herein.

[0216] 3.1.12 SPTSSA

[0217] In one embodiment the mutation in SPTSSA causes, or is associated with a defect in the lipid or sphinolipid pathway of the cancer cell as regulated by serine palmitoyltransferase activity arising from heterotrimers containing SPTSSA, especially SPTLC1/SPLTC2/SPTSSA and SPTLC1/SPTLC3/SPTSSA.

[0218] The mutation may minimise or preclude an interaction between SPTSSA and SPTLC1, or SPTSSA and SPTLC2, or SPTSSA and SPTLC3.

[0219] In this embodiment the loss of function mutation may be a mutation of the SPTSSA gene that leads to a reduction in production of a normal SPTSSA protein, or no production of normal SPTSSA protein at all.

[0220] A reduction in production of normal SPTSSA protein in a cancer cell is likely to be associated with minimised interaction between SPTSSA and any one of SPTLC1, SPTLC2 and SPTLC3, thereby leading to sub-optimal serine palmitoyltransferase activity. An absence of production of normal SPTSSA protein in a cancer cell is likely to preclude interaction between between SPTSSA and any one of SPTLCC1, SPTLC2, or SPTLC3, thereby ostensibly ablating serine palmitoyltransferase activity in a cancer cell.

[0221] A reduction or absence of production of normal SPTSSA protein may be associated with production of SPTSSA protein that is unable to functionally interact with any one of SPTLC1, SPTLC2, or SPTLC3. Such an SPTSSA protein may lack one or more functional domains required for these interactions. These SPTSSA protein mutants may be detected by standard techniques.

[0222] A loss of function mutation may present as an absence of all or part of a genomic sequence for SPTSSA as shown in Table 1, or an epigenetic change in a regulatory region of SPTSSA gene that leads to decreased SPTSSA gene expression. These mutation events may be detected by standard techniques as described further herein.

[0223] 3.1.13 KIAA1033

[0224] A loss of function mutation may present as an absence of all or part of a genomic sequence for KIAA1033 as shown in Table 1, or an epigenetic change in a regulatory region of KIAA1033 gene that leads to decreased KIAA1033 gene expression. These mutation events may be detected by standard techniques as described further herein.

[0225] 3.1.14 SPTLC1

[0226] In one embodiment the mutation in SPTLC1 causes, or is associated with a defect in the lipid or sphinolipid pathway of the cancer cell as regulated by serine palmitoyltransferase activity arising from heterodimers containing SPTLC1, especially SPTLC1/SPLTC2 and SPTLC1/SPTLC3.

[0227] The mutation may minimise or preclude an interaction between SPTLC1 and SPTLC2, or SPTLC1 and SPTLC3, or SPTLC1 and SPTSSA, or SPTLC1 and SPTSSB.

[0228] In this embodiment the loss of function mutation may be a mutation of the SPTLC1 gene that leads to a reduction in production of a normal SPTLC1 protein, or no production of normal SPTLC1 protein at all.

[0229] A reduction in production of normal SPTLC1 protein in a cancer cell is likely to be associated with minimised interaction between SPTLC1 and any one of SPTLC2, SPTLC3, SPTSSA and SPTSSB, thereby leading to sub-optimal serine palmitoyltransferase activity. An absence of production of normal SPTLC1 protein in a cancer cell is likely to preclude interaction between between SPTLC1 and any one of SPTLC2, SPTLC3, SPTSSA and SPTSSB thereby ostensibly ablating serine palmitoyltransferase activity in a cancer cell.

[0230] A reduction or absence of production of normal SPTLC1 protein may be associated with production of SPTLC1 protein that is unable to functionally interact with any one of SPTLC2, SPTLC3, SPTSSA and SPTSSB. Such an SPTLC1 protein may lack one or more functional domains required for these interactions. These SPTLC1 protein mutants may be detected by standard techniques.

[0231] A loss of function mutation may present as an absence of all or part of a genomic sequence for SPTLC1 as shown in Table 1, or an epigenetic change in a regulatory region of SPTLC1 gene that leads to decreased SPTLC1 gene expression. These mutation events may be detected by standard techniques as described further herein.

[0232] 3.1.15 VPS54

[0233] In one embodiment the mutation in VPS54 causes, or is associated with a defect in retrograde transport from late endosomes to the trans Golgi network, or with recycling of mannose 6 phosphate receptor (M6PR) in the cancer cell, either as mediated by the Golgi associated retrograde protein (GARP) complex which comprises VPS54.

[0234] The mutation may minimise or preclude an interaction between VPS54 and components of the GARP complex. The GARP complex regulates retrograde transport from late endosomes to the trans Golgi network. A functional GARP complex comprises the following components: ANG2, VPS52, VPS53, and VPS54. The mutation in VPS54 may minimise or preclude the interaction between these components and VPS54 thereby preventing the formation of a functional GARP complex.

[0235] In this embodiment the loss of function mutation may be a mutation of the VPS54 gene that leads to a reduction in production of a normal VPS54 protein, or no production of normal VPS54 protein at all.

[0236] A reduction in production of normal VPS54 protein in a cancer cell is likely to be associated with minimised interaction between VPS54 and components of the GARP complex, thereby leading to impaired retrograde transport and M6PR recycling. An absence of production of normal VPS54 protein in a cancer cell is likely to preclude interaction between VPS54 and components of GARP thereby leaving sub-optimal or no GARP function in the cancer cell.

[0237] A reduction or absence of production of normal VPS54 protein may be associated with production of VPS54 protein that is unable to functionally interact with components of GARP. Such a VPS54 protein may lack one or more functional domains required for GARP assembly. These VPS54 protein mutants may be detected by standard techniques.

[0238] A loss of function mutation may present as an absence of all or part of a genomic sequence for VPS54 as shown in Table 1, or an epigenetic change in a regulatory region of VPS54 gene that leads to decreased VPS54 gene expression. These mutation events may be detected by standard techniques as described further herein.

[0239] 3.1.16 TSSC1

[0240] In one embodiment the mutation in TSSC1 causes, or is associated with a defect in the early endosome retrieval pathway of the cancer cell, especially by minimising or precluding an interaction between TSSC1 and Golgi associated retrograde protein (GARP) complexes (composed of ANG2, VPS52, VPS53, and VPS54 subunits) or by minimising or precluding an interaction between TSSC1 and endosome associated retrograde protein (EARP) complexes (composed of ANG2, VPS52, VPS53, and Syndetin subunits).

[0241] In this embodiment the loss of function mutation may be a mutation of the TSSC1 gene that leads to a reduction in production of a normal TSSC1 protein, or no production of normal TSSC1 protein at all.

[0242] A reduction in production of normal TSSC1 protein in a cancer cell is likely to be associated with minimised interaction between TSSC1 and GARP complexes, or TSSC1 and EARP complexes, thereby leading to sub-optimal endocytic recycling or sub optimal retrograde transport at the Golgi. An absence of production of normal TSSC1 protein in a cancer cell is likely to preclude interaction between TSSC1 and GARP or EARP complexes thereby interfering with endocytic protein sorting within the cancer cell.

[0243] A reduction or absence of production of normal TSSC1 protein may be associated with production of TSSC1 protein that is unable to functionally interact with GARP or EARP complexes. Such an TSSC1 protein may lack one or more functional domains required for GARP or EARP complex interaction. These TSSC1 protein mutants may be detected by standard techniques.

[0244] A loss of function mutation may present as an absence of all or part of a genomic sequence for TSSC1 as shown in Table 1, or an epigenetic change in a regulatory region of TSSC1 gene that leads to decreased TSSC1 gene expression. These mutation events may be detected by standard techniques as described further herein.

[0245] 3.1.17 KIF11

[0246] In one embodiment the mutation in KIF1 1 causes, or is associated with a defect in the transport of secretory proteins from the trans Golgi network to the periphery of the cancer cell, especially by minimising or precluding the cross linking or sliding of anti parallel microtubules emanating from the trans Golgi network.

[0247] In this embodiment the loss of function mutation may be a mutation of the KIF11 gene that leads to a reduction in production of a normal KIF11 protein, or no production of normal KIF11 protein at all.

[0248] A reduction in production of normal KIF11 protein in a cancer cell is likely to be associated with minimised cross linking or sliding of trans Golgi network associated microtubules, leading to sub-optimal transport of secretory proteins to the cancer cell surface. An absence of production of normal KIF11 protein in a cancer cell is likely to preclude interaction between KIF11 and anti parallel microtubules emanating from the trans Golgi network.

[0249] A reduction or absence of production of normal KIF11 protein may be associated with production of KIF11 protein that is unable to cross link or slide anti parallel microtubules associated with the trans Golgi network. Such an KIF11 protein may lack one or more functional domains required for this interaction. These KIF11 protein mutants may be detected by standard techniques.

[0250] A loss of function mutation may present as an absence of all or part of a genomic sequence for KIF11 as shown in Table 1, or an epigenetic change in a regulatory region of KIF11 gene that leads to decreased KIF11 gene expression. These mutation events may be detected by standard techniques as described further herein.

[0251] 3.1.18 NDUFS4

[0252] A loss of function mutation may present as an absence of all or part of a genomic sequence for NDUFS4 as shown in Table 1, or an epigenetic change in a regulatory region of NDUFS4 gene that leads to decreased NDUFS4 gene expression. These mutation events may be detected by standard techniques as described further herein.

[0253] 3.1.19 COMMD4

[0254] A loss of function mutation may present as an absence of all or part of a genomic sequence for COMMD4 as shown in Table 1, or an epigenetic change in a regulatory region of COMMD4 gene that leads to decreased COMMD4 gene expression. These mutation events may be detected by standard techniques as described further herein.

[0255] 3.1.20 COL4A3BP

[0256] In one embodiment the mutation in COL4A3BP causes, or is associated with a defect in intra-cellular lipid transport in the cancer cell, especially transport of ceramides and diacylglycerol lipids, especially by minimising or precluding an interaction between steroidogenic acute regulatory protein related lipid-transfer (START) domain of COLA3BP and these lipids.

[0257] In this embodiment the loss of function mutation may be a mutation of the COL4A3BP gene that leads to a reduction in production of a normal COL4A3BP protein, especially COL4A3BP having a functional START domain, or no production of normal COL4A3BP protein at all.

[0258] A reduction in production of normal COL4A3BP protein in a cancer cell is likely to be associated with minimised interaction between the START domain and ceramides and diacylglycerol lipids, thereby leading to sub-optimal intracellular trafficking of these lipids within cancer cells, potentially effecting the amount of lipid available for lysosome development. An absence of production of normal COL4A3BP protein in a cancer cell is likely to preclude interaction between the START domain and these lipids thereby reducing or ablating intracellular lipid trafficking.

[0259] A reduction or absence of production of normal COL4A3BP protein may be associated with production of COL4A3BP protein that does not have a functional START domain. These COL4A3BP protein mutants may be detected by standard techniques.

[0260] A loss of function mutation may present as an absence of all or part of a genomic sequence for COL4A3BP as shown in Table 1, or an epigenetic change in a regulatory region of COL4A3BP gene that leads to decreased COL4A3BP gene expression. These mutation events may be detected by standard techniques as described further herein.

[0261] 3.1.21 VPS51

[0262] A loss of function mutation may present as an absence of all or part of a genomic sequence for VPS51 as shown in Table 1, or an epigenetic change in a regulatory region of VPS51 gene that leads to decreased VPS51 gene expression. These mutation events may be detected by standard techniques as described further herein.

[0263] 3.1.22 VPS52

[0264] A loss of function mutation may present as an absence of all or part of a genomic sequence for VPS52 as shown in Table 1, or an epigenetic change in a regulatory region of VPS52 gene that leads to decreased VPS52 gene expression. These mutation events may be detected by standard techniques as described further herein.

[0265] 3.1.23 VPS53

[0266] A loss of function mutation may present as an absence of all or part of a genomic sequence for VPS53 as shown in Table 1, or an epigenetic change in a regulatory region of VPS53 gene that leads to decreased VPS53 gene expression. These mutation events may be detected by standard techniques as described further herein.

[0267] 3.2 Individuals

[0268] An individual to whom the methods of the invention are applied is mammalian, preferably a human being.

[0269] An individual may not have cancer at the time of treatment. Such an individual may be at risk for cancer i.e. may have one or more risk factors for cancer. The individual may have had prior surgery or chemotherapy for removal and/or treatment of cancer. The individual may be in remission. The invention may be applied to such an individual to prevent the development of cancer, or to prevent cancer.

[0270] In another embodiment, an individual may have cancer at the time of treatment. The cancer may be benign or malignant. The cancer may be a primary or metastatic cancer. The cancer may be a solid tumour or encapsulated tumour. The cancer may be disseminated. Such an individual may be asymptomatic for cancer, or symptomatic for cancer. The invention may be applied to such an individual to treat or ameliorate or alleviate cancer.

[0271] In one embodiment, the individual to be administered itraconazole has a cancer, preferably a carcinoma, i.e. an epithelial cancer. Examples of epithelial cancer include cancers of prostate, lung, ovarian, breast, pancreatic, renal and biliary tract, and basal cell carcinoma.

[0272] In one embodiment, the individual to be administered itraconazole has a refractory or platinum resistant ovarian cancer.

[0273] In one embodiment, the individual to be administered itraconazole has a cancer of non epithelial origin, such as a leukemia, sarcoma or neuronal tumors.

[0274] 3.3 Screening Individuals for Itraconazole Sensitivity

[0275] Individuals may be screened for itraconazole sensitivity generally by assessing whether cells of the individual have a biomarker in the form of a mutation of a gene as described in Table 1, or a loss of production of a gene product encoded by a gene listed in Table 1.

[0276] In a particularly preferred embodiment, an individual may be selected for treatment or prevention of cancer, or screened for sensitivity to itraconazole therapy, or assessed for likelihood of having cells that are sensitive to itraconazole therapy by assessing whether cancer cells of the cancer in need of treatment in the individual have a mutation of a gene listed in Table 1.

[0277] In another embodiment, an individual may be selected for treatment or prevention of cancer, or screened for sensitivity to itraconazole therapy, or assessed for likelihood of having cells that are sensitive to itraconazole therapy by assessing whether non cancer cells in the individual have a mutation of a gene listed in Table 1. The detection of non cancer cells having the relevant mutation may indirectly indicate the presence of cancer cells having the same or similar mutation and hence sensitivity to itraconazole.

[0278] In another embodiment, an individual may be selected for treatment or prevention of cancer, or screened for sensitivity to itraconazole therapy, or assessed for likelihood of having cells that are sensitive to itraconazole therapy by assessing whether a body fluid, such as blood or plasma contains a gene product indicating that the individual has a mutation of a gene listed in Table 1. Nucleic acids in circulating blood may be detected by standard amplification techniques including PCR. Proteins may be detected by standard serological techniques.

[0279] Whole cancer cells, or fragments or lysates thereof may be obtained from an individual in the form of a solid biopsy or cytological smear by routine techniques.

[0280] The identity of cells as cancer cells may be determined by routine serological, histological or molecular techniques known in the art for detection of a relevant cancer cell.

[0281] In one embodiment, the method may involve the step of obtaining, or being provided with cancer cells from the individual in need of treatment for said cancer, thereby forming a test sample.

[0282] The method may comprise further steps of comparing the test sample with a control defining the amount or activity or function of a gene product of a gene having a sequence described by an accession number listed in Table 1, thereby utilising the control sample to determine whether the test sample comprises a gene product of a gene listed in Table 1 that is abnormal in quantity, preferably reduced or absent, or abnormal in function.

[0283] In one embodiment, a control may be may be derived from a single individual. In another embodiment, a control may be derived from a cohort of individuals.

[0284] A control may provide a reference point against which a determination regarding implementation of subsequent prophylaxis or therapy with itraconazole can be made. The determination may be made on the basis of the comparison between test sample and the control.

[0285] In certain embodiments, the control may be provided in the form of data that has been derived by another party, and/or prior to assessment of the subject for treatment. For example, the control may be derived from a commercial database or a publically available database.

[0286] In one embodiment the individual is selected for treatment or prevention of cancer, or screened for sensitivity of cancer cells to itraconazole, or administered itraconazole for treatment of cancer where a cancer cell of the individual comprises a gene product that is abnormal with respect to amount or function as compared with a control.

[0287] In certain embodiments, the samples to be tested are body fluids such as blood, serum, plasma, urine, tears, saliva, CSF and the like.

[0288] In other embodiments where the cancer is a solid tumor, the sample may be a solid tissue core as obtainable from a needle biopsy.

[0289] In certain embodiments, the sample from the individual may require processing prior to assessment of a loss of function mutation. For example, the sample may be centrifuged or diluted to a particular concentration or adjusted to a particular pH prior to testing. Conversely, it may be desirable to concentrate a sample that is too dilute, prior to testing. A sample may be subjected to routine histological, serological or molecular biological process.

[0290] In certain embodiments detection means may be utilised that bind directly to the gene product or relevant portion thereof to detect for the presence and/or quantity of the gene product or relevant portion thereof. In other embodiments a probe that binds with the detection means may be measured to indirectly detect for the presence and/or quantity of the gene product or relevant portion thereof. Such a probe or detection means may be an antibody or fragment thereof or a nucleic acid, such as an oligomer.

[0291] In one embodiment the individual is selected for treatment or prevention of cancer, or screened for sensitivity of cancer cells to itraconazole, or administered itraconazole for treatment of cancer where a cancer cell of the individual has a reduced production or no production of a protein or RNA encoded by a gene selected from the group consisting of: NBEAL1 (SEQ ID No:1), C18orf8 (SEQ ID No:2), COG6 (SEQ ID No:3), SLC30A9 (SEQ ID No:4), ARL1 (SEQ ID No:5), UNC50 (SEQ ID No:6), EPT1 (SEQ ID No:7), RTN4IP1 (SEQ ID No:8), SPTLC2 (SEQ ID No:9), SEC14L1 (SEQ ID No:10), CCDC22 (SEQ ID No:11), SPTSSA (SEQ ID No:12), KIAA1033 (SEQ ID No:13), SPTLC1 (SEQ ID No:14), VPS54 (SEQ ID No:15), TSSC1 (SEQ ID No:16), KIF11 (SEQ ID No:17), NDUFS4 (SEQ ID No:18), COMMD4 (SEQ ID No:19), COL4A3BP (SEQ ID No:20), VPS51 (SEQ ID No:21), VPS52 (SEQ ID No:22) and VPS53 (SEQ ID No:23). The amount of such a protein or RNA can be directly detected using standard techniques including serological techniques, or amplification techniques and the detected amount can be compared with a control as described above to determine whether the individual has a reduced production of the protein. Further, the amount of such a protein or RNA can be indirectly detected by determining whether the cell contains a gene mutation that results in decreased production or no production of the protein. Decreased production can be detected by analysing the nucleotide sequence of the gene in the cell to determine whether the gene contains a mutation such as a deletion, substitution or insertion that would lead to decreased or no production of a gene product of a gene listed in Table 1. Further, decreased production can be detected by determining the methylation status of the gene in the cell to determine whether there is an epigenetic change in the gene that would lead to decreased or no production of a gene product of a gene listed in Table 1.

[0292] 3.4 Pharmaceutical Compositions and Administration

[0293] Itraconazole and the pharmaceutically acceptable salts can be used as therapeutically active substances, e.g. in the form of pharmaceutical preparations. The pharmaceutical preparations can be administered orally, e.g. in the form of tablets, coated tablets, dragées, hard and soft gelatin capsules, solutions, emulsions or suspensions. The administration can, however, also be effected rectally, e.g. in the form of suppositories, or parenterally, e.g. in the form of injection solutions.

[0294] Itraconazole and the pharmaceutically acceptable salts thereof can be processed with pharmaceutically inert, inorganic or organic carriers for the production of pharmaceutical preparations. Lactose, corn starch or derivatives thereof, talc, stearic acids or its salts and the like can be used, for example, as such carriers for tablets, coated tablets, dragees and hard gelatin capsules. Suitable carriers for soft gelatin capsules are, for example, vegetable oils, waxes, fats, semi-solid and liquid polyols and the like. Depending on the nature of the active substance no carriers are however usually required in the case of soft gelatin capsules. Suitable carriers for the production of solutions and syrups are, for example, water, polyols, glycerol, vegetable oil and the like. Suitable carriers for suppositories are, for example, natural or hardened oils, waxes, fats, semi-liquid or liquid polyols and the like.

[0295] The pharmaceutical preparations can, moreover, contain pharmaceutically acceptable auxiliary substances such as preservatives, solubilizers, stabilizers, wetting agents, emulsifiers, sweeteners, colorants, flavorants, salts for varying the osmotic pressure, buffers, masking agents or antioxidants. They can also contain still other therapeutically valuable substances.

[0296] Medicaments containing itraconazole and the pharmaceutically acceptable salts and a therapeutically inert carrier are also provided by the present invention, as is a process for their production, which comprises itraconazole and the pharmaceutically acceptable salts and, if desired, one or more other therapeutically valuable substances into a galenical administration form together with one or more therapeutically inert carriers.

[0297] The dosage can vary within wide limits and will, of course, have to be adjusted to the individual requirements in each particular case. In the case of oral administration the dosage for adults can vary from about 0.01 mg to about 1000 mg per day of itraconazole and the pharmaceutically acceptable salts. The daily dosage may be administered as single dose or in divided doses and, in addition, the upper limit can also be exceeded when this is found to be indicated.

[0298] In one embodiment itraconazole is administered in an amount from 100 to 600 mg daily for a period of 4 weeks to 9 months.

[0299] The pharmaceutical preparations may conveniently contain about 1-500 mg, particularly 1-100 mg, of itraconazole.

### EXAMPLES

[0300] Matherials and Methods

[0301] Preclinical Studies

[0302] Cell Lines and Cell Culture

[0303] Ovarian cancer lines were obtained from different sources and cultured in either OSE (Wisent), RPMI 1640 supplemented with 10 mM HEPES (Life Technologies), DMEM (Life Technologies), or DMEM/F12 (Wisent), with 10% fetal bovine serum (FBS, Gibco) as previously reported³³. 293T cells were obtained from ATCC. All cell lines were cultured at 37° C. in a 5% CO2 humidified incubator. All cell lines were routinely tested to confirm the absence of Mycoplasma using the Mycoalert Detection Kit (Lonza).

[0304] Antibodies, Drugs and Reagents

[0305] Anti-Cas9 (#sc-517386) antibody was purchased from Santa Cruz Biotechnology. Anti-beta Tubulin (#ab6046) antibody, anti-p62 (ab56416) were purchased from Abcam. Anti-elF4E (#610270) and antibodies were purchased from BD BiosciencesAnti-LAMP1 (#9091) and anti-Rab7 (#9367) and anti-CC3 (#9661) were purchased from Cell Signaling Technology. Anti-VPS54 antibody (13327-1-AP) was purchased from Proteintech. Anti-Ki-67 (clone: MIB1, M7240) was purchased from Agilent Dako.

[0306] Secondary antibodies used for Western blotting were purchased from Licor. Secondary antibodies used from immunofluorescence, Hoechst (NucBlue® Live Ready Probes) and DAPI were purchased from Thermo Fisher Scientific.

[0307] Itra and CQ were purchased from Sigma-Aldrich. Alamar blue cell viability reagent was purchased from Thermo Fisher Scientific. Puromycin and blasticydin solutions were purchased from Invivogen.

[0308] Filipin III from Streptomyces filipinensis reagent was purchased from Sigma-Aldrich. Lysosomal Intracellular Activity Assay Kit was purchased from Biovision. Polybrene Infection/Transfection reagent was purchased from Milllipore. The QIAamp Blood Maxi Kit used for genomic isolation of CRISPR samples was purchased from QIAGEN.

[0309] Genomic DNA isolation kit was purchased from Norgen Biotech Corp. High fidelity master mix used for PCR was purchased from New England Biolabs. All-Prep DNA/RNA/miRNA universal Co-Isolation kit was purchased from QIAGEN. UltraView Detection Kit was purchased from Vantana.

[0310] Lentiviral Constructs, Lentivirus Generation and Infection

[0311] Lenti-Cas9-2A-Blast (Plasmid #73310) was purchased from Addgene. Lentivirus containing control LacZ and sgRNA targeting the essential genes PSMB1 and PSMD2 coding for proteosomal subunits were kindly provided by the Princess Margaret Genomic Centre (Toronto, ON, Canada). Lentiviral particles were generated by co-transfection of 293T cells with packaging plasmids psPAX2 (Addgene) and pMD2.G (Addgene) together with Lenti-Cas9-2A-Blast using Lipofectamine 3000 according to the manufacturer's instructions. Virus supernatant was harvested 48 and 72 hrs post-transfection. Cell lines were transduced with lentiviral supernatant in the presence of 8 μg/ml polybrene. Infected cells were selected for 48 hrs in puromycin containing media (OVCAR5 3.5 μg/ml and TOV1946 2 μg/ml) or 7 days in 5 μg/ml blasticidin containing media. Lentiviral particles used to knock out VPS54 and c18orf8 were purchased from Horizon discovery (Edit-R Human All-in-one Lentiviral VPS54 sgRNA, #VSGH11936-247734196 and #VSGH11936-247699202 respectively) and cells were infected according to the manufacturer's instructions.

[0312] Drug Treatments and Alamar Blue Assay

[0313] Cell viability was determined using the Alamar blue assay according to the manufacturer's protocol. Briefly, cells were plated in 96-well plates (2-4×10³cells/100 μL/well) and let attach overnight. Then they were treated with serial dilutions of Itra at a final concentration of 0-40 μM with or without chloroquine 5-10 μM. Cells were tested after 5 days adding Alamar blue solution to each well, incubating for 6 hours and measuring absorbance with a microplate reader (FLUOstar Omega, BMG Labtech) at a test wavelength of 550 nm. All the experiments were performed independently 3 times.

[0314] CRISPR Screen

[0315] Production of the whole genome sgRNA library TKOV3 lentivirus, 293T cells were transfected with psPAX2 (lentiviral packaging; Addgene #12260), pMD2.G (VSV-G envelope; Addgene #12259), and TKOV3 (Toronto KnockOut CRISPR Library; Addgene #90294) as previously reported³⁴.

[0316] For transduction of OVCAR5 AND TOV1946 cells, the TKOV3 virus was added with 8 μg/ml Polybrene in 15 cm dishes. Cells were selected with puromycin at 48 h post-infection. After selection cells were let grown for 5 days to stabilize and then divided in triplicates. Then Itra was added to separate replicates at a final concentration of 1 μM, with one set of replicates receiving no drug treatment. Both drug-treated and untreated replicates were not allowed to reach confluence in the 15 cm dishes. Cells were lifted, counted, and re-plated at the coverage stated above, and the excess cell pellets were frozen at −20° C. as a time point. Once at least 8 doublings were reached from T0, the screens were terminated, and pellets frozen at −20° C. Coverage of screens was kept at 400 cells per gRNA.

[0317] Genomic DNA (gDNA) was isolated from the frozen cell pellets using the QIAamp Blood Maxi Kit (Qiagen), submitted for PCR and next generation sequencing and analyzed as previously reported³⁴.

[0318] DNA Sequencing of c18orf8

[0319] Genomic DNA from CRISPR and control cells was isolated from one million cells pellets using the Genomic DNA Isolation Kit from Norgen Biotech Corp. DNA purity and concentration was determined using Nanodrop (Thermo Fisher Scientific). Then, a region in Exon2 (targeted by c18orf8 sgRNA) was amplified using the Q5 High-Fidelity 2X Master Mix (New England Biolabs) and the following primers: forward primer CTTGCTGCTTTTCCCTCTCA, reverse primer ACCTAAATGAGATGGGATTCCT. C18orf8 specific PCR band was isolated from agarose gel using the QIAquick Gel Extraction kit (QIAGEN) and eluted in water. Samples were submitted for sequencing using the above primers to the ACGT Corp (//acgtcorp.com/) (Toronto,ON, Canada).

[0320] Western Blotting

[0321] Proteins were extracted from cell lines by RIPA buffer (NORGEN Biotek Corp) with protease and phosphatase inhibitors (Roche). After centrifugation at 10,000 g supernatants were boiled in Laemmli buffer for 10 min and proteins were resolved by SDS-PAGE in Bolt 4-12% Bis-Tris Plus Gels (Thermo Fisher Scientific). Proteins were subsequently transferred onto PVDF membrane (Fisher scientific) and blocked for 1 hour with Odyssey Blocking Buffer in TBS (Licor), incubated overnight with primary antibodies Anti-beta Tubulin (#ab6046), anti-elF4E (#610270) anti-VPS54 antibody (13327-1-AP), and for 1 hour at room temperature in IRDye 680RD and IRDye 800CW conjugated IgG (Licor). Western blots were visualized using the Odyssey Infrared Imaging System (LI-COR Biosciences). Anti-beta Tubulin (#ab6046) and anti-elF4E (#610270) were used as loading control.

[0322] FILIPIN Staining

[0323] 20×10³ cells were plated onto 8 well cell imaging coverglass chamber slides (Eppendorf). After 48 hours cells were washed 3 times with PBS and fixed with freshly prepared 4% paraformaldehyde for 20 minutes at room temperature followed by 10 minutes incubation with 20 mM Ammonium Chloride in PBS for 10 min to quench the paraformaldehyde. After 3 washes with PBS cells were stained with FILIPIN (Sigma-Aldrich) at a final concentration of 50 ug/ml for 1 h RT. After rinsing cells images were taken using confocal microscope (Zeiss LSM700) equipped with an UV laser.

[0324] Immunofluorescence and Immunohistochemistry.

[0325] Cells were plated onto 8 well cell imaging coverglass chamber slides (Eppendorf). The day after cells were treated with drugs for 48 hours cells and fixed with freshly prepared 4% paraformaldehyde. Then cells were blocked and permeabilized with 0.5% BSA and 0.1% saponin in PBS for 1 hour and incubated overnight with primary antiboby (LAMP1, Cell Signaling Technology #9091) in blocking Buffer. After incubation with Alexa-Fluor688 conjugated anti-rabbit (Thermo Fisher Scientific) for 1 hour and with DAPI (Thermo Fisher Scientific) 1 μg/ml for 5 minutes cells were washed with PBS and analyzed by confocal microscopy (Zeiss LSM700). Lysosome diameter was measured using Fiji software³⁵.

[0326] Lysosomal Assay

[0327] Lysosomal function was performed using the Lysosomal Intracellular Activity Assay Kit (Biovision) according to the manufacturer's instructions. Briefly, cells were plated onto 8 well cell imaging coverglass chamber slides, let adhere overnight and treated with drugs for 48 hours. Then medium was removed and replaced with 0.5% FBS medium with or without drugs supplemented with Self-Quenched Substrate for 2 hours in the incubator. Nuclei were stained incubating cells for 5 minutes with Hoechst 33342 dye (NucBlue® Live Ready Probes, Thermo Fisher Scientific) and washed twice with the Lysosomal Assay Buffer. Images were taken using confocal microscope with 488 nm excitation filter and fluorescence intensity was calculated using Fiji software³⁵.

[0328] Bioinformatic Analysis.

[0329] Itra activity area was calculated using GraphPad Prism v6. Cell lines with normalized activity area at least 0.8 standard deviations (SDs) above the mean were defined as sensitive to the compound, whereas those with activity area at least 0.8 SDs below the mean were defined as resistant. Cell lines with activity area within 0.8 SDs of the mean were considered to be intermediate^{36,37}. The drugZ algorithm was used to identify chemogenetic interactions from CRISPR screen as previously reported³⁴ . Venny software (//bioinfogp.cnb.csic.es/tools/venny/) was used to generate Venn diagrams. Pathway analysis on significant CRISPR screen hits (FDR and pvalue<0.05) was performed using pathDIP (//ophid.utoronto.ca/pathDIP/)³⁸. Itra inhibitory percentage activity and heat maps were generated using SynergyFinder 2.0 (//synergyfinder.fimm.fi/) and Excel. Itra/CQ synergy score was calculated based Bliss reference model. Calculation of synergy scores and generation of 2D synergy maps were obtained using SynergyFinder 2.0 as previously reported³⁹.

[0330] Phase 1 Clinical Trial

[0331] Study Design HYDRA-1 (NCT03081 702)

[0332] A rolling-six phase I design was used to assess the combination of Itra (PrMint-Itraconazole, itraconazole capsules, Mint Pharmaceuticals Inc., Canada) and hydroxychloroquine (HCQ), a less toxic derivative of CQ⁴⁰ (PrMint-Hydroxychloroquine, hydroxychloroquine sulfate capsules, Mint Pharmaceuticals Inc., Canada), in patients with platinum resistant or refractory EOC (FIG. 14). Women received Itra 300 mg twice daily (BID) with HCQ as per dose escalation schedule (200 mg BID in DL1; 400 mg BID in DL2; 600 mg BID in DL3), continuously in a 28-day cycle. The fixed dose of Itra was determined in previous phase II trials⁶, and since there is no known interaction based on metabolism and pharmacokinetics, a rapid dose escalation of HCQ, through a rolling-six design was incorporated⁴¹⁻⁴³. The dose-limiting toxicities (DLT) include grade≥4 anemia or thrombocytopenia, grade≥3 diarrhea or rash and grade≥2 ocular toxicity, during the initial 28 days of treatment (Protocol in Supplementary Material). The calculated sample size for the phase I trial was between 6 and 18.

[0333] Tumour assessment occurred every 8 weeks (+/−1 week) by CT scan. Toxicity was assessed by Common Terminology Criteria (CTCAE) version 4.0. Pre- and on treatment biopsies (on cycle 1, day 8 to 14) were mandatory.

[0334] The primary objective was establishment of maximum tolerated dose; secondary objective was objective response rate (ORR) by RECIST v1.1 criteria, and progression free survival (PFS). Exploratory objectives were assessment of apoptosis, proliferation and angiogenesis pathways.

[0335] Patients

[0336] Enrolled patients were ≥18 years old with an ECOG performance status of 0-1, and platinum resistant or refractory EOC. Eligible patients had adequate blood and marrow function (hemoglobin ≥90 g/L, absolute neutrophils ≥1.5×109/L, platelets ≥100×10⁹/L, bilirubin within normal limits, AST ≤2.5×institutional upper limit of normal, ALT, serum creatinine within normal limits or creatinine clearance≥60 ml/min). Women on CYP3A4 inhibitors/inducers or on statins were ineligible. Patients with a known G6PD deficiency or a known retinopathy were ineligible. Patients with a clinical indication for treatment with Itra or HCQ, and those with intestinal malabsorption or active bowel obstruction were excluded. There was no limitation regarding prior number of lines of therapy.

[0337] Tissue Pharmacokinetic Analyses

[0338] Tumour Itra and HCQ concentrations were determined by a HPLC-MS/MS method with itraconazole-D9 and hydroxychloroquine-D4 as the internal standard. The HPLC system was interfaced to a SCIEX TRIPLE QUAD 6500+ mass spectrometer operating in the negative electrospray ionization mode. Data collection, peak integration, and calculation were performed using Analyst® 1.7 software.

[0339] Exploratory Objective Methods

[0340] RNA was isolated from FFPE tissue using the QIAGEN All-Prep DNA/RNA/miRNA universal Co-Isolation kit and sequenced using the using the TruSeq Stranded Total RNA kit with Ribo-Zero Gold from Illumina followed by sequencing using an Illumina Nextseq500 sequencer. RNA-Seq reads were aligned using STAR aligner v2.6.0c (https://doi.org/10.1093/bioinformatics/bts635). Gene expression was quantified using RSEM v1.3.0. Gene fusions were detected using StarFusion v1.5.0 (https://doi.org/10.1101/120295).

[0341] Immunohistochemistry (IHC) was performed using the BenchMark XT automated stainer (Ventana Medical System) with antigen retrieval (CC1, Tris/Borate/EDTA pH8.0, #950-124) for 64 minutes. The Ki-67 (clone: MIB1, M7240, Dako) dilution was 1:100 with 60-minute incubation. The anti-CC3 (D175, 9661, Cell Signaling Technology) dilution was 1:500 with 32-minute incubation. The anti-LAMP1 (9091, Cell Signaling Technology) dilution was 1:1000 with 60-minute incubation. The anti-P62 (2C11, WH000887M1, Sigma) dilution was 1:4000 with 32-minute incubation. The Ventana's ultraView Detection Kit (#760-500) was utilized and the slides were counterstained with Gill modified hematoxylin.

[0342] The H-score method was used to assess immunoreactivity for CC3, p62 and LAMP1. In brief, the H-score is obtained by the formula: 3×percentage of strong staining+2×percentage of moderate staining+percentage of weak staining, resulting in a range from 0 to 300. The Ki-67 proliferation index was visually estimated to the nearest 5% increment.

[0343] IHC slides were scanned at a 20× magnification using the Aperio Scanscope AT2 whole Slide Scanner (Leica) and IHC images and heat map analysis were obtained using Aperio ImageScope software (Leica).

[0344] Statistical Analysis

[0345] All dose response graphs were generated using GraphPad Prism v6. Histograms and Swimmer plots were generated using R software. Patient clinical features and response details were described using summary statistics, such as medians, ranges, frequencies and proportions. PFS analysis was conducted using the Kaplan-Meier method for all patients. Median and confidence interval were reported to assess PFS. Treatment related toxicity was evaluated using frequencies and proportions of adverse events based on severities and attributions. Statistical significance of differences among groups in lysosomal pattern, lysosomal function and TFEB nuclear translocation were assessed using the one-way analysis of variance (ANOVA) in which a p value≤0.05 is considered to be statistically significant. Pathway analysis on CRISPR screen results using PathDIP software uses Fisher's exact test and corrects raw P-values for multiple hypothesis testing based on Bonferroni and false discovery rate (BH method) methods³⁸.

[0346] Results

[0347] Evaluation of Therapeutic Potential of Itraconazole in Ovarian Cancer

[0348] To explore the therapeutic potential of Itra in the treatment of EOC, we screened a panel of 28 cells lines over 5 days of exposure. Quantitative scoring of differential Itra sensitivity was calculated using the activity area method (corresponding to the area over the drug response curve) as previously reported^{36,37,44} (FIG. 1A, FIGS. 2A-2C), and a threshold of 0.8 SD on the mean value was employed to identify sensitive and resistant cell lines, resulting in 7 resistant, 15 intermediate and 6 sensitive cell lines³⁷. These data suggest that Itra has an effect in a subgroup of ovarian cancer cells.

[0349] Lysosomal Compartments as Important Regulators of Itraconazole Resistance Identified Through a CRISPR Screen

[0350] To identify genes and pathways involved in resistance to Itra, we performed a whole genome sensitizing CRISPR screen in two cell lines (TOV1946 and OVCAR5). We stably expressed Cas9 (FIG. 1B, FIGS. 5A-C) and verified its activity with appropriate controls (FIGS. 4A-C). Infected cells were treated with non-toxic concentrations of Itra (1 μM) (FIG. 1B, FIGS. 4A-C). Analysis of the synthetically lethal hits using DrugZ algorithm³⁴ with a false discovery rate (FDR) and p value<0.05 reported 76 genes for TOV1946 and 242 genes for OVCAR5. Twenty genes were common in the two screens. To identify common pathways in the two screens, we carried out a pathway analysis³⁸ and found that many genes were related to vesicular trafficking and the dynamics between the transgolgi network (TGN) and late endosomal/lysosomal compartments (LE/L) (FIG. 10). To validate our CRISPR screen results we selected two genes involved in these pathways for further analysis, VSP54 and c18orf8, previously reported to have a role in lysosomal biology and dynamics.

[0351] C18orf8, also known as MIC1 or RMC1, is a component of CCZ1-MON1 complex that is required for recruitment of Rab7 at LE/L and lysosomal maturation. Knockdown of c18orf8 has been shown to impair lysosomal maturation, induce lysosomal enlargement and dysfunction and inhibit autophagy⁴⁵. Consistent with the CRISPR screen, stable knockout of c18orf8 (FIG. 4A) strongly sensitized OVCAR5 to Itra (FIG. 4B) and dramatically increased lysosomal size and decreased maturation as shown by a diffuse cytoplasm staining in knockout cells compared to a dotted like in control conditions (FIGS. 4D, 4E).

[0352] Vacuolar protein sorting-associated protein 54 (VPS54) is a component of the Golgi-associated retrograde protein (GARP) complex, which regulates retrograde transport from late endosomes to TGN and is particularly important for recycling of mannose 6 phosphate receptor (M6PR) required for proper delivery of lysosomal proteins⁴⁶. Knockdown of GARP VPS subunits leads to cholesterol accumulation in the lysosomes as a reflection of impaired delivery to the LE/L of cholesterol transporters and lysosomal enlargement and dysfunction. Similar to knockout of c18orf8, knockout of VPS54 lead to increased sensitivity to Itra, cholesterol accumulation (as measured by filipin staining) and lysosomal enlargement (FIGS. 4F, 4G, 4H). Absence of VPS54 did not influence lysosomal maturation as knockout cells showed a Rab7 dotted pattern in enlarged vesicular structures (FIG. 4I). Taken together, these results indicate that efficient lysosomal flux and function are important regulators of Itra resistance and impairment of these pathways strongly sensitizes ovarian cancer cells to this drug.

[0353] Synergistic Effects of Itraconazole and the Lysosomotropic Drug Chloroquine

[0354] We next postulated that drugs capable of phenocopying the effects of knocking out these two genes would result in an increased sensitivity to Itra. The antimalarial drug chloroquine (CQ) and its derivative, hydroxychloroquine (HCQ) are drugs that have been repurposed in several cancer related clinical trials for their anti-inflammatory properties and for targeting autophagy at lysosomal level³¹. Similar to VPS54 knockdown, CQ was shown to impair recycling of M6PR from late endosomes to TGN and to induce lysosomal enlargement and dysfunction⁴⁷. We thus tested and quantified the effects of combining Itra with CQ in the above used cell lines via the Bliss model measuring synergy⁴⁸. Similar, to what we observed for Itra alone, we found a different spectrum of activity to Itra/CQ combinations (FIGS. 5A-B, FIGS. 6A-8C). Interestingly, TOV1 946 and OVCAR5 were among the cells that showed the highest levels of synergy, showing an increase in sensitivity similar to previously reported for c18orf8/VPS54 knockout^{45,46} (FIGS. 5A-B, FIG. 6). Moreover, cell lines such as TOV21g exquisitely resistant to Itra alone as reported by low Itra activity area (FIGS. 1A-C), become very sensitive to the combinations with Itra and CQ being the second cell line ranked for synergy score (FIGS. 5A-B, FIG. 6). As expected, the Itra/CQ combined effect was observed but significantly reduced in c18orf8 and VPS54 knockout cell lines compared to controls (FIG. 9).

[0355] To better understand the biological effects of co-treatment with Itra and CQ, we examined lysosomal pattern, function and stress response in cells that displayed high levels of Bliss defined synergy (FIGS. 5A-B).

[0356] Lysosomal pattern and morphology was assessed by examining the Lysosomal-associated membrane protein 1 (LAMP1), one of the most abundant lysosomal membrane proteins that generally localizes to lysosomes and late endosomes^{24,27}. In TOV21g cells, we observed a combined effect in lysosomal enlargement (FIG. 11A) induction in parallel with a reduced lysosomal function (FIG. 11B). In particular, when evaluating lysosomal function using a the lysosomal Intracellular activity assay based on the employment of selfquenched substrate that become fluorescent once internalized and exposed to the lysosomal enzymatic activity⁴⁹, we observed an increased fluorescence (reflective of lysosomal function) in cells treated with Itra alone and a slight but significant reduction in cells treated with CQ. However, in cells co-treated with Itra and CQ fluorescence was barely detectable. Taken together these results indicate that the two drugs have a combined effect at lysosomal level, by reducing its degradative potential and affecting the ability to breakdown molecules, resulting in an aberrant accumulation of endocytic cargo that leads to lysosomal enlargement.

[0357] These results were corroborated by the effects obtained analyzing lysosomal stress response in cells co-treated with Itra and CQ (FIG. 11C). Member of the microphtalmia (MiT) family (TFEB, TFEB, TFE3) are transcription factors activated in starvation or lysosomal dysfunction conditions. Once activated, they translocate to the nucleus where they promote the expression of a network of genes related to lysosomal function and biogenesis⁵⁰. At a concentration of 10 μM CQ, we observed TFEB nuclear translocation in about 50% of cells; however, when we combined the two drugs, nuclear translocation increased significantly to 90%, indicating a substantial augmentation of lysosomal stress and biogenesis by the affected cells.

[0358] Validation cohort—Phase 1 clinical trial (HYDRA-1, NCT03081702)

[0359] Baseline Demographics

[0360] Between 2017 and 2019, 13 patients were enrolled and two withdrew consent to participate prior to the initiation of the therapy. Median age was 54 (44, 77). At least one cycle of treatment was administered to 11 women; five in dose-level one (DL1), three in dose-level two (DL2) and three in dose-level three (DL3). Out of the 11 patients, ten were evaluable for efficacy. Histology was high grade (91%, N=10) and low grade (9%, N=1) serous ovarian cancer, and median prior lines of systemic therapy was seven. Median number of prior lines of treatment was seven (range 3-9).

[0361] Safety and Clinical Activity

[0362] The most frequent treatment related toxicity was nausea in 36% of the patients (grade 1), followed by diarrhea, vomiting, fatigue and dry skin in 27% of patients (grade 1-2) (FIG. 16). Other grade≤3 adverse events were grade 3 hypokalemia and grade 4 QTc prolongation (in one patient, DL3). A DLT was seen in DL2, grade 3 hypertension, which was manageable with medication. There were no treatment discontinuations due to toxicity. Treatment was held in one patient (DL1) due to intolerable fatigue and muscle weakness. The recommended phase 2 dose (RP2D) was ltr 300 mg BID and HCQ 600 mg BID (DL3).

[0363] No objective responses were seen and one patient with low grade serous histology had stable disease for 3.7 months. Median PFS was 1.6 months (95% Confidence Interval 1-1.7 months) (FIGS. 12A,B). Median cycles of treatment per patient was two (range 2-4).

[0364] The treatment combination was feasible.

[0365] Pharmacokinetics

[0366] Pre and on-treatment biopsies were available for ten patients. The concentrations of

[0367] Itra and HCQ were detectable in all patients in the post-treatment samples and none of the pre-treatment samples. The highest concentrations of both drugs were detected in one patient, HYDRA-005 that received treatment at DL1, with an intratumor concentration of 0.745 ng/mg of tissue for Itra and 3.5 ng/mg tissue for HCQ (FIGS. 12C,D).

[0368] IHC and RNA Sequencing

[0369] Pre- and on-treatment biopsies were available for IHC analysis in ten patients. No significant changes were detected in the overall population in terms of IHC markers (autophagy, apoptosis, DNA damage and lysosomal markers), morphology, mitosis and proliferation index (Ki-67). To explore the pharmacodynamic effect of the drugs we stained the tumour sections for LAMP1 (a marker of late endosomes/lysosomes), as well as p62 (a marker that correlates with impaired autophagy). The expression of lysosomal marker, LAMP1, increased in one patient (HYDRA-005) in the on-treatment biopsy compared to the baseline biopsy. This patient also had an increase in the autophagy related protein (P62), previously shown to accumulate in tumours treated with CQ^{51,52}, and apoptosis related protein (cleaved caspase 3, CC3) (FIGS. 13A-B, FIGS. 10A-C). Non-significant differences were observed in Ki-67 staining in tumour tissues (FIG. 14B). This patient had higher intra-tumour drug concentrations, and a decrease in size in the target lesions (FIGS. 12C-D); however, there was no correlation with clinical benefit.

[0370] Single-sample gene-set enrichment analysis using RNA sequencing data did reveal any change from pre- to post-treatment samples in relevant pathways including apoptosis, angiogenesis, cholesterol metabolism, lysosomal-autophagy and Pl3K-AKT-mTOR pathways pre-treatment and on-treatment samples.

[0371] Discussion:

[0372] Despite optimal front-line treatment, recurrence rates in stage III/IV disease are high, with median overall survival in platinum resistant setting estimated at only 12 months⁴. Platinum resistance is multifactorial and evolves over time in response to selective pressure of treatment⁴. By repurposing two U.S. Food and Drug Administration (FDA) approved drugs, the antifungal drug Itra and the antimalarial drug HCQ, we explored lysosomal homeostasis as a potential therapeutic target in the treatment of EOC.

[0373] Based on previous studies showing the beneficial effects of Itra in patients with EOC^{5,22,23,53}, we investigated the therapeutic potential of Itra across a wide panel of EOC cell lines and identified synthetically lethal gene deletions of genes involved in vesicular trafficking and dynamic exchanges between TGN and lysosomes. We validated hits from our CRISPR screen known to affect lysosomal maturation and function, VPS54 and c18orf8 to show in both cases, knock-out cell lines resulted in an abnormal lysosomal morphology as characterized by lysosomal enlargement. This change in lysosomal pattern is frequently associated with acidification defects, aberrant accumulation of endocytic cargo, lysosomal dysfunction and observed in many lysosomal storage disease⁵⁴. Most importantly, knockout of VPS54 and c18orf8 dramatically increased sensitivity to Itra, confirming results obtained from the CRISPR screen. We also saw evidence of synthetic lethal interactions in other members of the GARP complex, a heterotetrameric tethering factor consisting of four subunits, VPS51, VPS52, VPS53 and VPS54. Interestingly, other GARP subunits resulted among the top hits in the CRISPR screen as significantly associated with Itra sensitization, with VPS53 and VPS52 subunits having an FDR and p value<0.05 in TOV1946 and a FDR close to 0.1 and p value<0.05 in OVCAR5 (FIG. 17).

[0374] The GARP complex has been reported to be recruited to the trans Golgi network by Rab6 in mammalian cells. Depletion of VPS subunits results in a block in transport of a several cargos, including the cation-independent mannose-6-phosphate receptor (CI-MPR), indicating that GARP has a general role in endosome-to-TGN transport pathways^{46,55}.

[0375] The antimalarial drug CQ, and its derivate used in therapy HCQ, are lysosomotropic compounds sharing similar chemical structures and mechanisms of acting as a weak base³¹. As liphophilic molecules with weak base properties they can readily diffuse across cell membranes via passive diffusion and upon entry into acidic lysosomes and late endosomes, undergo protonation and are hence entrapped in lysosomes in their cationic state^{56,57}. The pH gradient between the lysosomal lumen and the cytosol drives hyper-accumulation of these drugs leading to high intra lysosomal concentration²⁹. Prolonged treatments with CQ/HCQ and other lysosomotropic cationic drugs induce the formation of large vacuole-like structures that are formed following osmotic imbalance possibly causing water influx and lysosomal swelling⁵⁸. Moreover, the increase in lysosomal pH impairs the release of lysosomal proteins from Mannose 6 Phosphate receptors that normally are released at low pH and thus a reduced vesicular recycling to TGN⁴⁷. Thus, these drugs have been shown to phenocopy the effects observed with knockout of VPS54 and c18orf8⁴⁷.

[0376] This combination treatment was explored to all the cell lines previously tested with Itra and interestingly we observed a synergistic effect in several cell lines, including some that previously showed high resistance to Itra (FIGS. 5A-B, FIG. 3, FIG. 8). These data were corroborated by a (I) combined effect of Itra with other potent lysosome targeting agents like Bafilomycin A and Concanamycin A)⁵⁹ (data not shown) and (ii) in cells stably expressing fluorescent TFEB, we observed a significant increase in nuclear localization, and thus an increase of a lysosomal stress condition, in presence of both drugs compared to single treatments. A recent paper by Weber et al., described the importance of iron and cholesterol metabolism in combination with lysosomal de-acidification, yet we are unaware of any literature linking itraconazole and iron metabolism. It is however possible that sensitive cell lines have a greater degree of cholesterol dependency in the presence of both lysosomal disruption and cholesterol antagonism.

[0377] To gather more knowledge about the therapeutic potential of this drug combination translated to a clinical scenario, we then conducted a phase I dose-escalation study assessing the combination of Itra and HCQ in platinum resistant or refractory EOC. This combination was safe at the determined dose but did not lead to anti-tumour activity with the combination. Interestingly, one of the patients in DL1 (HYDRA-005) had evidence of higher drug concentrations in tumour and increase in the relevant pathways including apoptosis, autophagy and lysosomal markers with evident signs of lysosomal enlargement, per IHC. These data suggest that Itra/CQ combination can be effective in conditions where both drugs accumulate at a minimum effective concentration in tumour tissue; however, although target lesions decreased in size, this did not correlate with clinical benefit as the patient had progressive disease with formation of new lesions. The limitations of our study include that given that it was a pilot study only a small number of patients were enrolled. Women had predominantly high grade serous ovarian carcinoma and were heavily pre-treated with a median of seven prior lines. In addition, (excluding patient HYDRA-005), generally the tissue concentration of Itra was insufficient to achieve an anti-tumour effect. Making the assumption that 1 μg of tissue correspond to a volume of 1 μl, we can estimate a concentration of maximum of 1 μM for Itra in patient HYDRA-005, and a range of HCQ of 5-10 μM. By comparing these concentrations to the in vitro experiments, it becomes clear that Itra concentration in tissues may be the limiting factor for a proper efficacy of the two drugs and that a strategy aimed at augmenting Itra concentration in the tissues could provide better result. Previous retrospective studies in EOC suggested a signal of activity of Itra in combination with chemotherapy in clear cell histology²³. Advanced clear cell tumours are an aggressive chemo-resistant subtype of EOC,³ whose biology often involves canonical signaling pathways such as e PI3K/Akt signaling pathway are is the major molecular aberrations observed in 40% of patients³. Itra can exert anti-tumour effect by both suppressing the PI3K signaling pathway, being a potential therapeutic alternative to explore in this aggressive subtype of EOC as well as potentially releasing cytotixic free cholesterol from lysosome disruption. Remarkably, one of the cell lines that showed the highest synergy of Itra in combination with CQ was a clear cell carcinoma cell line indicating that this clinical subgroup could be particularly sensitive to lysosomal targeting. This hypothesis is supported by parallel in vitro studies in renal clear cell carcinoma cell lines where Itra and CQ cytotoxicity synergy was observed (data not shown). Unfortunately, one of the limitations of our study is that patients with clear cell histology were not enrolled in the clinical trial

### REFERENCES

[0378] 1. Noone A M Krapcho M, Miller D, Brest A, Yu M, Ruhl J, Tatalovich Z, Mariotto A, Lewis D R, Chen H S, Feuer E J, Cronin K A, H. N. SEER Cancer Statistics Review, 1975-2015, National Cancer Institute. Bethesda, Md., https//seer.cancer.gov/csr/1975_2015/, based November 2017 SEER data submission, posted to SEER web site, April 2018.

[0379] 2. Ramalingam, P. Morphologic, Immunophenotypic, and Molecular Features of Epithelial Ovarian Cancer. Oncology (Williston Park). 30, 166-176 (2016).

[0380] 3. Lheureux, S., Braunstein, M. & Oza, A. M. Epithelial ovarian cancer: Evolution of management in the era of precision medicine. CA. Cancer J. Clin. 69, 280-304 (2019).

[0381] 4. McMullen, M., Madariaga, A. & Lheureux, S. New approaches for targeting platinum-resistant ovarian cancer. Semin. Cancer Biol. (2020). doi:10.1016/j.semcancer.2020.08.013

[0382] 5. Pantziarka, P., Sukhatme, V., Bouche, G., Meheus, L. & Sukhatme, V. P. Repurposing Drugs in Oncology (ReDO)-itraconazole as an anti-cancer agent. Ecancermedicalscience 9, 521 (2015).

[0383] 6. Antonarakis, E. S. et aL Repurposing itraconazole as a treatment for advanced prostate cancer: a noncomparative randomized phase II trial in men with metastatic castration-resistant prostate cancer. Oncologist 18, 163-173 (2013).

[0384] 7. Tsubamoto, H. et al. Repurposing itraconazole as an anticancer agent. Oncol. Lett. 14, 1240-1246 (2017).

[0385] 8. Lam, A., Hoang, J. D., Singleton, A., Han, X. & Bleier, B. S. Itraconazole and clarithromycin inhibit P-glycoprotein activity in primary human sinonasal epithelial cells. Int. Forum Allergy Rhinol. 5, 477-480 (2015).

[0386] 9. Aftab, B. T., Dobromilskaya, I., Liu, J. O. & Rudin, C. M. Itraconazole inhibits angiogenesis and tumor growth in non-small cell lung cancer. Cancer Res. 71, 6764-6772 (2011).

[0387] 10. Wang, Y. et al. Itraconazole can inhibit malignant pleural effusion by suppressing lymphangiogenesis in mice. Transl. lung cancer Res. 4, 27-35 (2015).

[0388] 11. Nacev, B. A., Grassi, P., Dell, A., Haslam, S. M. & Liu, J. O. The antifungal drug itraconazole inhibits vascular endothelial growth factor receptor 2 (VEGFR2) glycosylation, trafficking, and signaling in endothelial cells. J. Biol. Chem. 286, 44045-44056 (2011).

[0389] 12. Ueda, T. et al. Itraconazole Modulates Hedgehog, WNT/beta-catenin, as well as Akt Signalling, and Inhibits Proliferation of Cervical Cancer Cells. Anticancer Res. 37,3521-3526 (2017).

[0390] 13. Liang, G. et al. Itraconazole exerts its anti-melanoma effect by suppressing Hedgehog, Wnt, and PI3K/mTOR signaling pathways. Oncotarget 8,28510-28525 (2017).

[0391] 14. Kim, J. et al. Itraconazole, a commonly used antifungal that inhibits Hedgehog pathway activity and cancer growth. Cancer Cell 17, 388-399 (2010).
[0392] 15. Kim, J. et al. Itraconazole and arsenic trioxide inhibit Hedgehog pathway activation and tumor growth associated with acquired resistance to smoothened antagonists. Cancer Cell 23, 23-34 (2013).

[0393] 16. Head, S. A. et al. Antifungal drug itraconazole targets VDAC1 to modulate the AMPK/mTOR signaling axis in endothelial cells. Proc. Natl. Acad. Sci. U.S.A. 112, E7276-85 (2015).

[0394] 17. Xu, J., Dang, Y., Ren, Y. R. & Liu, J. O. Cholesterol trafficking is required for mTOR activation in endothelial cells. Proc. Natl. Acad. Sci. U.S.A. 107, 4764-4769 (2010).

[0395] 18. Head, S. A. et al. Simultaneous Targeting of NPC1 and VDAC1 by Itraconazole Leads to Synergistic Inhibition of mTOR Signaling and Angiogenesis. ACS Chem. Biol. 12, 174-182 (2017).

[0396] 19. Kim, D. J. et al. Open-label, exploratory phase II trial of oral itraconazole for the treatment of basal cell carcinoma. J. Clin. Oncol. 32, 745-751 (2014).

[0397] 20. Rudin, C. M. et al. Phase 2 study of pemetrexed and itraconazole as second-line therapy for metastatic nonsquamous non-small-cell lung cancer. J. Thorac. Oncol. 8, 619-623 (2013).

[0398] 21. Nussbaum, N. et al. Patient experience in the treatment of metastatic castration-resistant prostate cancer: state of the science. Prostate Cancer Prostatic Dis. 19, 111-121 (2016).

[0399] 22. Tsubamoto, H., Sonoda, T., Yamasaki, M. & Inoue, K. Impact of combination chemotherapy with itraconazole on survival of patients with refractory ovarian cancer. Anticancer Res. 34, 2481-2487 (2014).

[0400] 23. Tsubamoto, H., Sonoda, T., Yamasaki, M. & Inoue, K. Impact of combination chemotherapy with itraconazole on survival for patients with recurrent or persistent ovarian clear cell carcinoma. Anticancer Res. 34, 2007-2014 (2014).

[0401] 24. Piao, S. & Amaravadi, R. K. Targeting the lysosome in cancer. Ann. N.Y. Acad. Sci. 1371, 45-54 (2016).

[0402] 25. Ballabio, A. & Bonifacino, J. S. Lysosomes as dynamic regulators of cell and organismal homeostasis. Nat. Rev. Mol. Cell Biol. 21, 101-118 (2020).

[0403] 26. Fennelly, C. & Amaravadi, R. K. Lysosomal Biology in Cancer. Methods Mol. Biol. 1594, 293-308 (2017).

[0404] 27. Luzio, J. P., Hackmann, Y., Dieckmann, N. M. G. & Griffiths, G. M. The biogenesis of lysosomes and lysosome-related organelles. Cold Spring Harb. Perspect. Biol. 6, a016840 (2014).

[0405] 28. Wartosch, L., Bright, N. A. & Luzio, J. P. Lysosomes. Curr. Biol. 25, R315-6 (2015).

[0406] 29. Lu, S., Sung, T., Lin, N., Abraham, R. T. & Jessen, B. A. Lysosomal adaptation: How cells respond to lysosomotropic compounds. PLoS One 12, e0173771 (2017).

[0407] 30. Bonam, S. R., Wang, F. & Muller, S. Lysosomes as a therapeutic target. Nat. Rev. Drug Discov. 18, 923-948 (2019).

[0408] 31. Verbaanderd, C. et al. Repurposing Drugs in Oncology (ReDO)-chloroquine and hydroxychloroquine as anti-cancer agents. Ecancermedicalscience 11, 781 (2017).

[0409] 32. Weber, R. A. et al. Maintaining Iron Homeostasis Is the Key Role of Lysosomal Acidity for Cell Proliferation. Mol. Cell 77, 645-655.e7 (2020).

[0410] 33. Medrano, M. et al. Interrogation of Functional Cell-Surface Markers Identifies CD151 Dependency in High-Grade Serous Ovarian Cancer. Cell Rep. 18, 2343-2358 (2017).

[0411] 34. Colic, M. et al. Identifying chemogenetic interactions from CRISPR screens with drugZ. Genome Med. 11, 52 (2019).

[0412] 35. Schindelin, J. et al. Fiji: an open-source platform for biological-image analysis. Nat. Methods 9, 676-682 (2012).

[0413] 36. Staunton, J. E. et al. Chemosensitivity prediction by transcriptional profiling. Proc. Natl. Acad. Sci. U.S.A. 98, 10787-10792 (2001).

[0414] 37. Dong, Z. et al. Anticancer drug sensitivity prediction in cell lines from baseline gene expression through recursive feature selection. BMC Cancer 15, 489 (2015).

[0415] 38. Rahmati, S., Abovsky, M., Pastrello, C. & Jurisica, I. pathDIP: an annotated resource for known and predicted human gene-pathway associations and pathway enrichment analysis. Nucleic Acids Res. 45, D419-D426 (2017).

[0416] 39. Ianevski, A., Giri, A. K. & Aittokallio, T. SynergyFinder 2.0: visual analytics of multi-drug combination synergies. Nucleic Acids Res. 48, W488-W493 (2020).

[0417] 40. McChesney, E. W. Animal toxicity and pharmacokinetics of hydroxychloroquine sulfate. Am. J. Med. 75, 11-18 (1983).

[0418] 41. Haria, M., Bryson, H. M. & Goa, K. L. Itraconazole. A reappraisal of its pharmacological properties and therapeutic use in the management of superficial fungal infections. Drugs 51, 585-620 (1996).

[0419] 42. Lee, J. Y. et al. Association of Polymorphisms of Cytochrome P450 2D6 With Blood Hydroxychloroquine Levels in Patients With Systemic Lupus Erythematosus. Arthritis Rheumatol 68, 184-190 (2016).

[0420] 43. Tett, S., McLachlan, A., Day, R. & Cutler, D. Insights from pharmacokinetic and pharmacodynamic studies of hydroxychloroquine. Agents Actions Suppl 44, 145-190 (1993).

[0421] 44. Barretina, J. et al. The Cancer Cell Line Encyclopedia enables predictive modelling of anticancer drug sensitivity. Nature 483, 603-607 (2012).

[0422] 45. Pontano Vaites, L., Paulo, J. A., Huttlin, E. L. & Harper, J. W. Systematic analysis of human cells lacking ATG8 proteins uncovers roles for GABARAPs and the CCZ1/MON1 regulator C18orf8/RMC1 in macro and selective autophagic flux. Mol. Cell. Biol. (2017). doi:10.1128/MCB.00392-17

[0423] 46. Wei, J. et al. The GARP Complex Is Involved in Intracellular Cholesterol Transport via Targeting NPC2 to Lysosomes. Cell Rep. 19, 2823-2835 (2017).

[0424] 47. Brown, W. J., Goodhouse, J. & Farquhar, M. G. Mannose-6-phosphate receptors for lysosomal enzymes cycle between the Golgi complex and endosomes. J. Cell Biol. 103, 1235-1247 (1986).

[0425] 48. Foucquier, J. & Guedj, M. Analysis of drug combinations: current methodological landscape. Pharmacol. Res. Perspect. 3, e00149 (2015).

[0426] 49. Humphries, W. H. 4th & Payne, C. K. Imaging lysosomal enzyme activity in live cells using self-quenched substrates. Anal. Biochem. 424, 178-183 (2012).

[0427] 50. Napolitano, G. & Ballabio, A. TFEB at a glance. J. Cell Sci. 129, 2475-2481 (2016).

[0428] 51. Cook, K. L. et al. Hydroxychloroquine inhibits autophagy to potentiate antiestrogen responsiveness in ER+ breast cancer. Clin. cancer Res. an Off. J. Am. Assoc. Cancer Res. 20, 3222-3232 (2014).

[0429] 52. Niklaus, M. et al. Expression analysis of LC3B and p62 indicates intact activated autophagy is associated with an unfavorable prognosis in colon cancer. Oncotarget 8,54604-54615 (2017).

[0430] 53. Tsubamoto, H. et al. Repurposing itraconazole as an anticancer agent. Oncol Lett 14,1240-1246 (2017).

[0431] 54. de Araujo, M. E. G., Liebscher, G., Hess, M. W. & Huber, L. A. Lysosomal size matters. Traffic 21,60-75 (2020).

[0432] 55. Chia, P. Z. C. & Gleeson, P. A. The regulation of endosome-to-Golgi retrograde transport by tethers and scaffolds. Traffic 12,939-947 (2011).

[0433] 56. Zhitomirsky, B. & Assaraf, Y. G. Lysosomes as mediators of drug resistance in cancer. Drug Resist. Updat. 24,23-33 (2016).

[0434] 57. Zhitomirsky, B. & Assaraf, Y. G. Lysosomal sequestration of hydrophobic weak base chemotherapeutics triggers lysosomal biogenesis and lysosome-dependent cancer multidrug resistance. Oncotarget 6,1143-1156 (2015).

[0435] 58. Mauthe, M. et al. Chloroquine inhibits autophagic flux by decreasing autophagosome-lysosome fusion. Autophagy 14,1435-1455 (2018).

[0436] 59. Huss, M. & Wieczorek, H. Inhibitors of V-ATPases: old and new players. J. Exp. Biol. 212,341-346 (2009).

1. A method for preventing or treating cancer in an individual comprising administering a therapeutically effective amount of itraconazole to an individual in need of said treatment, wherein a cell of the individual has a mutation in one or more genes selected from the group consisting of NBEAL1 (SEQ ID No:1), C18orf8 (SEQ ID No:2), COG6 (SEQ ID No:3), SLC30A9 (SEQ ID No:4), ARL1 (SEQ ID No:5), UNC50 (SEQ ID No:6), EPT1 (SEQ ID No:7), RTN4IP1 (SEQ ID No:8), SPTLC2 (SEQ ID No:9), SEC14L1 (SEQ ID No:10), CCDC22 (SEQ ID No:11), SPTSSA (SEQ ID No:12), KIAA1033 (SEQ ID No:13), SPTLC1 (SEQ ID No:14), VPS54 (SEQ ID No:15), TSSC1 (SEQ ID No:16), KIF11 (SEQ ID No:17), NDUFS4 (SEQ ID No:18), COMMD4 (SEQ ID No:19), COL4A3BP (SEQ ID No:20), VPS51 (SEQ ID No:21), VPS52 (SEQ ID No:22) and VPS53 (SEQ ID No:23).

2. The method of claim 1 further comprising assessing or having assessed a cell of the individual to determine whether the cell has a mutation in a gene selected from the group consisting of: NBEAL1 (SEQ ID No:1), C18orf8 (SEQ ID No:2), COG6 (SEQ ID No:3), SLC30A9 (SEQ ID No:4), ARL1 (SEQ ID No:5), UNC50 (SEQ ID No:6), EPT1 (SEQ ID No:7), RTN4IP1 (SEQ ID No:8), SPTLC2 (SEQ ID No:9), SEC14L1 (SEQ ID No:10), CCDC22 (SEQ ID No:11), SPTSSA (SEQ ID No:12), KIAA1033 (SEQ ID No:13), SPTLC1 (SEQ ID No:14), VPS54 (SEQ ID No:15), TSSC1 (SEQ ID No:16), KIF11 (SEQ ID No:17), NDUFS4 (SEQ ID No:18), COMMD4 (SEQ ID No:19), COL4A3BP (SEQ ID No:20), VPS51 (SEQ ID No:21), VPS52 (SEQ ID No:22) and VPS53 (SEQ ID No:23) and selecting the individual for treatment of cancer with itraconazole where the individual has a mutation in a gene selected from the group consisting of: NBEAL1 (SEQ ID No:1), C18orf8 (SEQ ID No:2), COG6 (SEQ ID No:3), SLC30A9 (SEQ ID No:4), ARL1 (SEQ ID No:5), UNC50 (SEQ ID No:6), EPT1 (SEQ ID No:7), RTN4IP1 (SEQ ID No:8), SPTLC2 (SEQ ID No:9), SEC14L1 (SEQ ID No:10), CCDC22 (SEQ ID No:11), SPTSSA (SEQ ID No:12), KIAA1033 (SEQ ID No:13), SPTLC1 (SEQ ID No:14), VPS54 (SEQ ID No:15), TSSC1 (SEQ ID No:16), KIF11 (SEQ ID No:17), NDUFS4 (SEQ ID No:18), COMMD4 (SEQ ID No:19), COL4A3BP (SEQ ID No:20), VPS51 (SEQ ID No:21), VPS52 (SEQ ID No:22) and VPS53 (SEQ ID No:23).

3. The method of claim 2 wherein the mutation is a loss of function mutation.

4. The method of claim 3 comprising determining whether the cell of the individual has reduced production, or no production of a protein or RNA encoded by a gene selected from the group consisting of: NBEAL1 (SEQ ID No:1), C18orf8 (SEQ ID No:2), COG6 (SEQ ID No:3), SLC30A9 (SEQ ID No:4), ARL1 (SEQ ID No:5), UNC50 (SEQ ID No:6), EPT1 (SEQ ID No:7), RTN4IP1 (SEQ ID No:8), SPTLC2 (SEQ ID No:9), SEC14L1 (SEQ ID No:10), CCDC22 (SEQ ID No:11), SPTSSA (SEQ ID No:12), KIAA1033 (SEQ ID No:13), SPTLC1 (SEQ ID No:14), VPS54 (SEQ ID No:15), TSSC1 (SEQ ID No:16), KIF11 (SEQ ID No:17), NDUFS4 (SEQ ID No:18), COMMD4 (SEQ ID No:19), COL4A3BP (SEQ ID No:20), VPS51 (SEQ ID No:21), VPS52 (SEQ ID No:22) and VPS53 (SEQ ID No:23), wherein reduced production or no production of a protein or RNA encoded by a gene selected from said group determines that the cell has a loss of function mutation in the gene, thereby determining whether the cell has a loss of function mutation in a gene of said group.

5. The method of claim 2 wherein the cell that is assessed for a mutation is a cancer cell.

6. The method of any one of claim 2 wherein the cancer is an epithelial cancer.

7. The method of claim 2 wherein the cancer is ovarian cancer.

8. The method of claim 7 wherein the cancer is refractory or resistant ovarian cancer.

9. The method of claim 7 wherein an ovarian cancer cell is assessed to determine whether the cancer cell contains a loss of function mutation in C18orf8 (SEQ ID No:2) and/or VPS54 (SEQ ID No:15).

10. The method of claim 2 wherein itraconazole is utilised as a monotherapy for treatment of the cancer.

11. The method of claim 2 wherein itraconazole is utilised as a chemosensitizer for a further chemotherapeutic compound for treatment of the cancer.

12. The method of claim 11 wherein the further chemotherapeutic compound is selected from the group consisting of chloroquine and tamoxifen.

The application's sequence listing, which the Patent Office published only in electronic form, follows.

SEQUENCE LISTING (23 sequences)

SEQ ID NO: 1 - DNA, 211411 bp, Homo sapiens
tgagacagtgtctcgctctgtcgcccaggctggagtacagtggcgccatcggagctcactgcaaccttcactcccaggttcaagcgattctcccaccttagcttctaagtagctggaactacaggcgtgcaccaccacgccaagctaattaaaatttcttttgcagagacagggtctcattctgttgcccaggctgatctcctgggttcaagggattcgcccgcctagacctcccaaaattctggaattacaggcgatagccactgcgcctcgtctctggctcttcacaggcaatttgtggatccttgttacaaatgaaacaagatgggacattagttgatcatttttgaagttgggtgacggtatacagggtttcgttatactagtttactttagaatatacttgaaatctttcacaataaaaagttgtggaaatgtttaacaaaggtgagttatcttacgcgtttttctttccttatacaaaaaccaaatctctctgaaagttgtctatagttagtaaagccttttgcttcttttctgaaaaagaaaaaccctttcgaagtctttagtggtggtaaaataagccctttggatatgacactcggtgacgacgaaagcaggcacaaaaggaaaagaggagtttttggggggtgtctgtgtgtgttttgtctttttacattactctaaattcccagaaccaatcccggttctacaaataagtgaaacaaaatcccctttaacaccgtagggtctcacgccctcagatgactcacggaaatgacgccatcagcgaaaagcggggcgggcgtagacgtcagcacgtcagccctcctccatgtccagctgagggaaggctcgtttcagtgccgcggccggcgcccgccaagggatgggcagccagagcctgtcgactgcggctgcgcaggtatgctggggcggggcttcaggtcaccccgcccatccccagcctacgcgaccattgaacagctgccgcccaacggctgggtaaatcctcagcggccgaaatgattagcccagggggcagccccgccccctgctcctcccggcctctcgccccgcccccatgtcccgcccgctcgtctgcctggctgcggggtgacacggggcttcgccttgggaaggggtcgagggaagcagttagacggctgccgggcggcggctgccgcgcggcacacaatgtgagcccggtgatggggagcgggccgttgggaagagggggcggcatggcaagaaatgggagggccccggtgcttggtggtggaggggctgcagagtgaggggcggctttgagtgggctaggctgtcagggagtgttccgatactgtagtgcaggctgggatcgcggtcgggagacgccgagtccgcattcctcagttctagagcttctcttggcagctcggcacaccttaagtttgcctctgtttgggttgtcttgggatgtgaggaggaaattaaaagattcccccaaacacttggatgcttctttgggaagttcctcgccggtgtgtgcgtgcccacttctcttggatggaaaggtggagaggccaggtgggcgggtggacttccactctccgaggattgttagaacaaacgaactgggaattcctcccccgcccccacgccctgccctgcaacacagcaaacagtcccaactactccacccccaccccaccccagacggagtcttgctctgtcgcccagactggagtgcagtggcgtgatctgggctcactgcagcctctgcctcccgggttcaagcaattctcctgcctcagcctcctgagtagctgggattacaggtgcccgccaccacgcccggctaattttttgtatttctttagtagagacaggggttcactgtgttggccaggctggtctcgaactcctgacctcaggtgattcacgcacttgggcctcccaaagtgctgggattacaggcgtgagccaccgcgcctggccccaacaactttgaagaggagaccagaacaagaacattctaagagctttgatgtatttgaaatgtctgagatgtgggccttttccttgtatctgtacaaaaggtatgagtgggaagggagtcttgctccttattctcactggacgcattcttggttatgaacatgtacccatctctaggagtctgtctgccctagaggattctatggtggacatactgtgttagctgtgatgttttcctgaaacacaagtttctatgaaatctaatcagtccatgtgaaagtatagcgggttgtttgtgggaagtgaagaagatacatctttagtttttgataagtctagattttttagtatggcctctttttctaacctgtggatgtttttctctttcacagatttatttaattgcccaactaccactgatgaagatatattggagtgactgctgaaattgcctttttgtttttaaccagaggacagtccatttgtttcacttctttttgctttctttactgctatgagctttactgaacggctgaaaaacttggaaaataaaatggacatgctgtagtcttgaacataatttttttaaggaaaacttaaagtgccagagtgaaagccagaatggcatccagagagaggctctttgaactttggatgctttattgtacaaaggtaattgctttcctttttatttttatgttttaaaatactttattataaaatttgtgactggcagtagtaacactttatttaatagataatagtgtatttagtcataatgaataaccccaaacttaaaagcgtttaaaggattttctgttttcctctttttcaggtttgaacacacatacaatattggcatactgttaaaaactgtagggtgcggcttttatttgatacttatccccaaatgatcctaaaattatataagtaaaattatgcccttaagagaaaaataaaatatttttatttttgtttgtgcttttcattttctcccacaagtgagtgtaggatagagacatttttatgagaagggcattaagcatttttcttggaatgaacctttgaaattgcatcacaaggttattgattgaactgcgtgctgtgtgactgccactaagttagcactctttgagcattgtctcatttccttctcactacaatactgtgaggtgaatattgtgatcatccccttttactgatgggaaaactgatgcaagggttacaggagtactgagtagccgagaaacacagtactacctgactcaagtgcgtacttttatccatttttactccttaatatttttgtcactcagaaataatgttctttcccctccttgtctttatgtgaatttttacttgatagctttgattttaggttattgagaagagtactccttaaaaacatgtttttcaagtgaggaggtacattattactttgaagatactggcaagggtcagagaaacacccctaatgtactatttgagttaatttaagtatgtgtggtgaaattctcaagtcacagcttctgtttctgcattatcctttcatgctccttaaaaggcagattattatttaacagtggtctcatttatctgtcatattaaatttagagattacactggaattttctttgacttcctggtttgatatatattataattgctaaaggacatacactttgaaatgcttaatatgaatttttaaaatagcttttagtcttgcataatttaataccagaaatgtctttttaaaaatagacgcttccaataaaaaaggaatccaattcaccacttttgaaaatagtcactaacacgttaaccaaaaattaaaattaatttttagtatgaatacctagtagtttgaaaatgatttatttaaaaatacatcaaacttactaggttttactgttttcaaaatgatattggtgaatggggttacgtgtctcattaataagttacattctttttaggtatatttactattaaatttaatattaaagcttattaaacagatagtatagttcattggcatacactgaattttattcttaatggcttttaatataaacatgcatcccttctcctttgaaatgttaatcctcaataatgaaggcccctcactgtcagattttgaagcctatctcttcttggacaggaatataaatctcatttttaggtttaatatttaaataatttgtgtgcttaatacgatttaaaattttttcacttgttttcaaagaatatttatttaaaaccgtgattttatattttaccagttaacggataagctttttgtaaggtagacaacattctcttctgcagacaccttgaatcaggtagctaccaaatatacctcatagatttaagtcttctttctaatgaggatgactaccaaatactgtacccagttgttctctatactttttgccttattattctcactctagcatttagcctctcaaaccagctgactttttttttttcccagctgacaaacttttaaggcttttttttttcacacttttaatgagctttcagaccacttgaggactcagatcttcttatgaaaatattttctaccacttagtttcaaaagcttcttagacctctttgtgagcttgaaatcgtagtttagttttggctctgctgctgctttgttttgtaaccttgaacaagacttactctttgggtctcagtttttctcatttgttgagtaagcatgtgtgcatgtatgtatatacagggagaatgcttatctaactcagtattcaggtttttgtttgtttttacctctgagggacaagcagttttttttgttgttgttgttcttattctgtagatggttatgtagaactttttagttctttctttttaaaacttttattgtggaaattctcaagcatgcaccaagtagagatgttatagtgaactcttttgtgtctgtcacccaattttgactattaccagctcatgttcagtcacagtttatgtataactgtcaatttgccctatctcctaattattttaaagcaaatcccagacaatttatgatcttatctgtaaatatttaaatatgtgtaataactcctcttaaaaacaatcatgacacaatttttaaaattatcaaatatgtgatcaatgttcttactttcctcctagtttcttaatattcgtattttcccactgtttggctcagtatttaaaacaaagtatacatgtattttgttgaaaatatctgctaaacattttcatgtataggctccccttcaccatatttttattctttgctgtttatgtgttgaagaaaccagattttgaccttagagttttctacagtttgaacgttttgctcattgaattcccttgattttatttaattgttcctctcttctggtatctggaaactgaccgaacagaggcctgattgatttgggttgttttgggtgtgaagggctagaataatttattagtgtagcggccatctgtgatttttgcctatatgtgttattttattaggattttgcaaaactgtataatttatattgagaactgtctctatcagcatttgattacagttccttaaagggaaggcaggtggcatatatgtttgattctctttgtcagttttcacaatgacttaatttactagcatcctcccaagatgatcaattgtttttcttgagtataaagtccatctttaatgattaaagtgtctgctgttttgttgccctgcttggtttgatgtctacacaaaacattgtatacatacctgattaaagaagacaccttggaagatttatgaaggactgcttccgggcagtaaggttaagacctcctccgtatttgccacagtgctaaccttggcacagatattccacagtgtattaacaataggtcaatattaaggtacctaccatcacagcgtttctgtcaggttttaaagttgtccctgaacattgcaaaagttcagtaggtctagtagtagtactacctcagaaataacccttgggtaatactgcttggtcacagcaatgctaaaagaacgctaatggaatatatatgtcttctgcctgggttcaattgtaagcttaaatactagtgactaaagtcctttaagtagaattaaaataaattaccagtttcagtttttagcagatggagtcccaatatttgaaagaatttgagtataaaacttggcaatttatttgattttatttttaattgataataattttatctgataattttaattgataaataattttaattgataataattttaattgataataatttatggggtacaatgtaatgttttgatacattgtggaatcatcaaatcaggctaattaacatatctgtcacctcacatacttaccatttctttgtgatgtgcaatttggtttcttaccaaacttttcaggtctaacttcactttctccttctaggaataggctttaattaaattgttagaaacatgtgtcttcttcctaaaaggttactttgtaaaccttatgttgttattgtataatacaagcaggatgatttctaatcacccaacagtcctgctttctaaagattctttcaccagtgtataagactattaattcaagttgtatagtctgaacctaggcgcagtggcttatgtctgtaaggctcactggaaggctgaggtggatggatcatttgagatcaggagtttgaaaccagcttggccagcatggtgagaccccgtctctactaaaaatacaaaaattagccgggcatggtggcatgcacctgtaatcccagctactcaggaggctgaggcaggagaatcgcttgaacttaggaaacagaggttgcagtgagccgagattacgccattgccttccagcctgggtgacagagtgagactctgtctcaaaaaaaaaaaaaaaaagaaaaaccccaaattatatagtctgaactcttcttgccttcaaatggttgtccccacccagggtcaaggatttgattaacagcacatttcttatagctcttataagttaaacattaatttgaacaggtttaatcttgtatctggattttagttcagtagttaactacttcttgtctgagtgtatttttcttaagtatagaagtattttaatactagtacttaagtatacagttttttgtttgtttgttttggagacggagtctcactctgtggcccaaactggagtgcagtggcccaatctcagctcaccacaacctccaaccttctgggtgcaagctattctcctgcctccctcagcctcccgagtagctggtatttacaggcacatgccaccaggcccagctaaatttttgtatttttagtagtgacggggtttcaccatgttggtcaggctggtcttgaactcctgtttttaatagagatggggtttcaccatgttggccgggctggtcttgaactcctgacctcaggcgatccaccctcttcagcctcccaaagtgctgggattacaggcgtgagccactgcgcccagcccagtattttttttaatgtctaaagatttcagggcaggtgtggtggctcatgcctgtaatcccaacactttgggaggctgaggcaggtggatcacttgagcttgggagtttgagaccaacctgggcaacatggtgaaaccccatctctaccaaaaatacaaaaaaattagccaggcatgatggtgcacacctgtggtcccagctactcaggagatagggtgggaggattgcttgaacccgggaagtgtaggttgcattgagctgagatcgtgccactacactccagcctgggtgacagagtgagaccccatttaaaaaaaaaaaattagtttatatatatgtagtaggcaccatgttattcactgtattttttgataattcacttttaacatacagtaagagagatggtgctgagaacaatttttgtttctatattattatatacaaagttttgagactcatatgtgtgtagaaaaagacatgtatcggctgggcacagtggctcacgcctgtaatcccagcactttgggagaccaaggtgggtggatcatgaggtcaggagtttgagaccagcgtggccaaaatggtgaaaccccgtctttactaaaaatacaaaaaaaattagccaggcacggtggcgggcacctgtaatcccacctactcgggaggctgaggcaggagaatcacttgaatccgggaggcagaagttgcagtgacctgagatctcgccactacactgtagcctgggcgacagagcaagactctgtttcaaaaaaaaaaaaaagaaagaaaaagaaaaagacatgtatcataaattccctatctcaactgcaacccttggacagacttaaggacgtatttctattagacacttagccttttgggagtgctgcagttagttggtcactagaatatgtagaaaaaagaaactgagcctctcaaagtcttagataagattaagctatttttgttctgtctggtgtaaagtatcaaatgcgttaactgagtaaaaacatacaaagtgactcaaaagcacagcattttgaaatgtggcagtgtagattgaaaaccatggttcatttttgtcattagctttaaaaaattttttattttattttattttattgagattgaattttgccctgaacagttttgtgaagctgcagtattagaggtgatatttagtcccaattctgtgtctgatcttaaggacctaaaaggttaacctagtttctttgtatctcagttttctcatctgtcaaatggaaaaacataactattttacatatctgtcaaaattttttagaaaagagattttatttaaatgtattttaagaggaagagagataaaaatgtaatctttataagtattttgcagatgtgtgggtgtggacatgtgtgtatcaggattacttccatttgcccttgtattaatataataatagagggcaatattctcttactattttatcagtagtaatgaagctgtattcattaatgtcttaaccgagaatgtcttaactgattttaaatctgtacttatttttgctttcaaggatagtgcttaattatcttgaataatgatttgagggtcctccctactctaaaccaaatttattttggatgttgatgatgctccatttcctgctgttgccctttgtcctgctaaatctggaatatgactgaaatagatagttttgcagtgagctcagagtaaacttccttttcagaataaaagttttgtttcaaaaagaaaatagaatttagaggtgttttattcagttaaaaggcaagtatctctttttatacatagatttggaaaaatggaattagtgaatatctgtttaatgagaaaattattaacttattagtacaattttggttataatcctaaataagtttttagtaagatggaccaatacatatcaacccttataatttaagccacatttagtaagtctctggtatgtgcaaagtgtgaaaatggctcttgattttctgtggcttaataacagctttgtatgtaaggaaggtaatgttctttgactctaaagaaaagaaaacaaaatcattgacagcctagtactagtagttaccacttacatgtttattttcagaatttaggtatgaaagcaagaaatgtatagtttatatcagtggacctgaaatgaaaaacgttgttaagatgcattaactttttaaattctttccttttgagcatcaaactttaaatttccctggaagaaggtgaaattgatagtacttaagtgtaagtgtggagtataatgtgcagatgtgtaagagtctgaaataatttcttgtgtgttttttttttttctgtttgtttcggacaaaaaaaaacaccgtggtcttcccatgcacagttagctagacaagatcactaactaggttttcaggtaagcatgctgacttttccatgtttgtgggacattcaggtagaaatactcaatatgtggagttcagaagagaggtctgtgctggaaataaagatttgagagttctcatattgggaattattggagggttattatgagaataagaagagaagaaggtaaaaggaagccctgaagaacattgtcatttaagaagaagacagagttttggaaccagtctgggcaaaacagtgagatcacgtctctgttatttaaataaataaataaataggtgacagaggaagaagagtttgtaagtttaaatgagagaggagccaggagtgactgggttgcctcagaaagtacagggatattggctgggtgcagtggctcatgcctataattctagctctttgggagggcagggtgggagatttgcttgagctcgggagtttcagtctacagtgagctgggatcatgccactctagtccagcctgggtgacagagtaagactctttctcacacaaaaaaaaaaaaagaaaaaaagaaaaaagtagtcaggggtgtcaaattcaacatggcagtcaagaaaagtattacggtccgcatctggtggttcacacctgtaatcccagcattttgggaggccaaggtgggaggatcatttgaggtcaggagtttgagaccagcctggccaacatgatgtaacctcatctctactgaaaatacaaaagttagctgggtggggtggcatgcacctgtaatcgcagctacttaggaggcaagagaatcacttgaatccaagaggccggggttgcagtgggtcaaatttgtgccactgcactccagcctgggcaatagagtgagactctgtctcaaaaaaaaaaaaagaaaaaaagaaaagcattatggagcatgtattggatttgacagtttacatattattggcggcctgaggtgggcagatcacttgaggccaggagttcgagactagcctggccaaaatggtgaaacccgtctctactaaaaatacaaaaattagctgtgtatggtggtgcaggcctgtggtcccagctactcaggaggctgaggcaggagaatcgcttgaacctggggggcggagactgtagtgagccgagatcgcaccactgtactccagtctgggcaacagagcgagactctgtctgaaataaataaataaataaatacatacatacatacataaattgatggcttttccaaaagcagttctgaaaagaatgaaaaagttaaaaatgcaagtccttatattattaattttttattattaaattcaacagacttaaaattactaccaaactgctactaaagtttgtagatagatgtttcctctttatctttgtactaacctggccaaggacctttattggtctgtgtaccacactttgtgtggcactgctgtagaacatctgaaaattctcagataccttagaatccatctgtaaatccagagatctgtaatttgaaacatattgctttataaattgaactgtcactgatgatcccttggtagcaatccaaatgtgacctttgaaatcgagtagcaatactagtcgcgaggtagttttccctaatatgcttaaagtaatttaaaaattaataaaaacaggagtgcaaactttaaaaatttctatatggagcttatagacctctgaaaatatttctgataactccgagcattctcggaccttagttttagaaacaagtcttgaacaattattatatctgaaatactttgattgctctacatttgctacagcttttttttcctttctgcaaaattacgttgcaagttttgttacaagcaagtaaagaattgggaccaaagatccaatctactgcagtcttctttctaggcacaattattcatatttctcctatatgcaaaatgtacttcatatctatctcaagaactccaaaactctcatccaatcatgacaccagtcttgaaacatgggatctgtggtatatatagatccaattgtggtttttcttgatattatggtctgtgaactcagaggacacttggtatctgtcctctgcaaatccagttgggcaaatattgcctggtttctctatcctcagggaagaaatgttccatgatatgagtcagtacctgccctggctactcttctctcttgctcttggctgtgttttcttggaggttcttttttttttatcccatcattttccttttgctgtatctgaagtgggcattggagactacactttgttgtgactgagcagctctctcagcagcttgccttctgtgttaggaagtcccctacagaaaatgaggacttccctccccttctaattcttctgcttctagttctcttttgtttagttatattatcttataactcctacataatattctatagtaatggaaataagggatatacttgtcttgctcctcattttagcaggaaaaagattaggttttcctgttatgttagcttcagaatttggggctgagacatgtatatttatgtctgtttttttgtgtataaccactttaaatcatagatcagtgtaatttataatgttagatattttattaccttattcatttttttctaggtctgctgatatttctcatattacctgtttgcacctcttagaatatattatacaattactaagaatagttttatgtgtgtatacattaagatgtggataattagtctattatgttgtagagaaatgatattcttaagacttcacataattgaaaagaatcactgttattacttgctttaattattggtattcagtagttgccattttaaattttttttttttttttgagacagtctttgtcttgctctgtctccaggctccaggctggagtacagtggtgtgatctcggctcactgcaacctccacctcccgggttcaagcaattctcctgcctcagcctctcaagtgtctggaactactggtgtgcaccaccatgcccagctaatttttgtatttttagtagagacagtgtttcaccatgttggccaggatggtctcaatctcttgaccttgtgatctgcctgcctcggcctcccaaagtgctgggattacaggcgtgagccacagccactggcctaaatattctcctttagtagaatcctcattatgcattttaagtaggttcatttggaatcaggtgttccacttaattttcaatagtctttcattgttaaagacgtacagtaaaatgcttctaggtcaaagtttaatgccttgtagtgttttaatatacgttcagcctggctgttgacaaaaacccttgatttcttcttattatttttaactcctccacccccaactcttgatttcttttgtggaaatataattcagtttttttgtgacaattttgtcctggtcattcaaaatctattaagatatagggaactatgtagactgactatgaaatgtgccatagccatatttgaaatcctttgaaggtatcagaattcaggcaagggttagtaacacttgcttcctcatccctttgtcagcttttatttaaaataatggaatttacattataatgtgccactttgttttcattaatggaaatgagctctactcaaatatattttatacagaccctgctgtcttaaaaaatgaaaaaataacttagccatatctaagagatatcaacatttttcttgatgttttgtgacttaccttcaggctggtagtggtatctacccagatttaaagaagattaaatgatatacccatttcacacaaaagtcaagcatttcaaaacagtttacctctgtaaaaaaaaaaatgttgtttgatgcatttaactgctacataatttttactgacactgaacatttgaatggtaggaaaggtgtgtaatttatgatgccactgtgaggtgaatttatacctcttttttattgagtgatttttgtctgttcaaaatacaaaatttaacctttctagtgaatgaactttattttatggagaaaaatgaaaaatatatggactttctgttttaagacacagggcattgctctgtcacccaggctggagtacagtggcataatcgtagtagctccctataaccttggactcgtgaggtcaagtgatcttcctatttcacccttccaagcagctaggactacaagtgtgtgccaccacacctggctattttctgaacaattttttttttttttaaatggagtctcgctctgtcaccagcctgaagtgcagtggcgtgatcttggctcactgcagcctccgcctctggggttcaaacaattctcctgcctcagcctcccgagtaggtgggactacaggcacgtgccaccacgcctagctaatttttgtatttttagtagagatggtttttcaccatgttggccaggaaggtcttgatctcttgacctagtgatctgcccacctcagcctcccaaagtgctgggattacaggtgtgagccactgagcctggcccaatttttttttttttttaagagacagggtcttgctatgttgcccaggctgatcttgaactcctgttgtaagcaatccttatgcctcggcctcccaaaatggtggaattataggtgtgagccactgtgcctggcctgactttttgattggatttatgttctaagaaaaaatagtaatattttacttttatgctgagctttaattttttaattaagatatataacttaattgtagaatatttgaaaaatacaggtatgcaggaggtcagttacagaaaatctcattattcagagacttttagttctttatggatgtgtaaattaattacatttactactacaaattattaatatatttaatttgaaaaacttcaacttgacatgaaacttgaagatcatttcaagtttcatggaatgttttaaactccatttgacaagtgtcaatgttatattaatatgtctatatattaatatatacatgttaatatatttaatacatttatagtaataatatttttctttcctaaagaattaactttagtcccgtttgactcatttttattgggtgcctgctgtatgcacatgtcccttgaattttatattttcctatttttttatttggttaattttttaaaaatttataaattgtatttttagagcagttttaggttcccagaaaaattgagcagaaagtatagagcattcccatataccccctgtccccacacatgcacaaccttccctaccatctatatcctggaccacaatgcgcccttttgataactcgactgacttcccagaaacacctgcatcagaaacttttgagtcagagtcttgctctgctgctcaggctggagtgcaatggtgtgatctcagctcactacaacctccacctcccgagttccagtgagtctcgtgcctcagtctcctgagtagctgtgattatagggtggctaatttttgtacgcctggctaatttttttacttttagtagagatgaggttttaccatgttggccaggctggtctcaaactcctggcctcaagtgctctgcccgcctcagcttcccaaagtgttgggattacaggcatgagcccccacacccagcctgcatcagaagcttctttacctgaccaccatgtgtgaaactccaagataaacacagaattcatgcaagaggacatattttacctaacattgcagatgtgggccagttctgctgattttaactgtgatttttctacagtatattgttcagacctggaactttattagttatctgaatggatagttacataaacttttaagaagttctagcctggggcaacatgatgaaacctgcctctacagataatacaaaaattagccgggcacgatggcatgtgccagtggtcccagctactcaggaggccgaagtgggagaatcacttaagcccaggtggttgaggctgcagtgagccatgattttaccactgtacttcagcctgggcaatagagtgagaccctgtctcaaaaaaaaaaaaaaaagctaataaaaacatacaaaaagtaaaatttgaaacctttctcactaggaattggtgtattctaagcctattttgtatatatacacctctattacaatattactacttttgtttttgttaaagtggcttccaaacctctcttggatgtgatgggttttcctttcattaaaatttttgccttcttctatttaattgactatgacttcatctgagggcatgcttttccagctagaatcagtttcccacttagactgtaggtccagataataagtaaactaaagcaagatggagggatgaagtcatcaggtatagcttagtggaaaaggtagcatcgatcaaggttttaaaggatctatagtagcttaatagttacagaagatgttccaggcaagtgtaaggcatgaccgaacaaaggaagagtggtccttaagtatagattttcatttctggtaataaggtagactaggttgtttagacttatccttctgaaaattactagaaattctggataaaatttaagaaacatcttaaaagcattgaaaaactggcaacatggtaagacatcatgaaaccaaatcttaatgaaagcagaaacttaggtaaatgaaagtctcttttgcctggtgaacttgaggttttgttttcatggccttgtaagtgggtaggagttagaagaggcttctgttcttttcaagatgggcctctccatagtactgaacttctagattcccccagagtaagtgatcaaataataataataataaagaacaatttacaataataataacaaatatcaaatgtaaagccaagggactaaccggaatgagaaatctaagaaaatttcccttctgattcccaaagcttacaactttggcataaggatcaattagattctaagcaaacacacttaactctcctccctccactaggacttcaggggaaagtgcatgagtgagaaccaacagaagtagacagtaaacatggatctagaaagacttcatatgttgatattagaaggcagagattataaaataaatataccaggtacagtggctcacacctgtagtcccagcactttgggagactgagatgaaaggatcacttgagaccagactgcgcaacatagtgaggccctgtctctacaaaaaaaattcaaaaattagccaggcatggtggtgcatgcctatagtcacagccacttgggagactgaggtgtgaggatcactcgaacccagtatgttgaagctgcagtgagctgttgttgctatctcagaaaaaaagttgaacagattctatatatcacggaatctgaaaacatggattgtaagatatgccattactttatgtaacatttagaaaaatgctggcagttaaactgcagatttataacttatttcctgatgtatgaattgaccataccaggttctcattgttttgaaatttctctcatcttttcctagtgatttggcagtttctcttgtcttcgtttgcattgtttggcttatgatagataatctttccacacatgtatttccttttcatctatttgagagtatctctcattttcaagtttataaagcactaagcttttcgtcagaaaacatacaattgtgatcgttcctatggtaatgaatatttgcttcgttaatgtcaaattatatcctgttgctctgttctcaatgcctttctttgtatacaatttcattttattgcctaatcacagtataattttttgaagacattttgagtggtagttaaacttatgtgtagtactaactatacatgttaatctagtgaaggaatgtcaatatgaagtctactaccaggtttgcacatgaacaggcaagagcaaatgtcagctacttctctaagggcaattttgagatgcattttaatttcaaagatgtcaaatgttaagaatcttagaatcatagaaatatgaaaaaagtgacctggcagttttgaaaaagaaatagactatcttgaaatgggggaaaaattggaattttaaaaaattgaacgataaaagtacattttagaacttggtagctacagaattacttaggaaaatttaaatacatatgttagaaataaaaaagactaaaacttaatgaactagtcatttgtggtagccagtcttcagattctacctcctggtattctacctcctggtatttacactcttgtatacaatcccctcccacattgtaccattgttgatctgtgtgatcagtagaatttggcaaaagtgatagtatgtcatttccgaaattaggctatgaaaggcactactgtttcacctcagttgttctttattattttttgattgcttactccgggggaatccagaagttcagtaatgagtagccctacggagaggcccatcttgtaaagaatagaaggctcttgcgaactaccatatgagtgagcttttaagtggttccttcagcccagtcaagctttggtatgactgtgtccttagttggcatgttcattatgagatcatgagaaatcctgagccagaagcaccaacctgagccactcttgaattctgaccataagaaacagtgagataataaatgtttgttggtttaagttgctaaattttagggtaatttgttatgcaggaatagataactattgcatcatctgtttaagaagataagaacagctgggcacggtggctcacacctgtaatcccagcactttgggaggctgaggcgggcagatcatggggtcaggagatcaagacaatcctggctaacacggtgaaaccccgtctctactaaaaatgcaaaaaaagattagccgggcgtggtgtcgggcacctgtagtcccagctacttgggaggctgaggcaggagaatggcgtgaacccgggaggcggagcttgcagtgagctgagatcgtgcataagaacaaaaacccaaagaaagagtgaaggaaattgtagctttttttttttttttttttttttttagacagagtctcactgttgccaaggctggagtgcaatggtgccatcttggctcactgcaacctccacctcctgggctcaagtgattctcctgcctcagcctcccgagtagctgggactacaggcacacaccaccacgcctggctagtttttgtatttttggtagagacaggttttcattatgttggccaggctggtctcgaactcctgacctcgggtgatccacctaccttggcctcccaaagtgctgggattacaggcatgatccaccatgcccatctggaagttgtacctttttattttattattatttttttaatttaattttattttttgagacggagtctcgctctgtcgcccaggctggagtgcagtggcgcgatctcggctcactgcaagctctgcctcccaggttcacaccattctcctgcctcagcctcccgagtagctgggactacaggtgcccgccaccacgcatggctaattttttgtatttttagtagaaacgaggtttcacagtgttagccaggatggtctcgatctcctgacctcgtgatctgcccacctcggcctcccaaagtgctggaattacaggcgtgagccaccgcgcccagccagttgtacctttttaaatgtgaaagttcccaaatttattgtatgtattttcagttgttgtgggaaatatacatatatcagaaagttggcatgtactaaggaatagatttatattgaacaggccactatccattacataacatcttgggattagtagcataaacacagtctgtatctggatatacttttaattgagaatctggaagtgggattgagaataataaatagctctttcttctgcaaatctttctagtagtaatggtgttattatgaggaaattgtcaggtttttgcagaaattactcataatgaaataccagatctaggaaatgatgatcagtagtttctagtgtcacaacccccaccacccttttttaaaaaacttttccaattgtatctattatcatccaagtgaaaagtgttgggatgaatacttggttaggaaatgctgacttctccagtcttataatcctattatgattatccactgtttcctatcatttccacactggaatgataccaaatgttatacatctttgaacatatcttgctgttttctctctgtctggattcctctcttcccccgaccctccctgagagtatctgtttatgattctttgaaaacttttttgagcatttgggactacacatttacccccccacccttgacagaatcaataactcccttctttgtattatttcagtatttttcacaactgttgcttcacaggctgttttgcatttacttgtttatacctcttttctcttgaacaatgagcactttgaggacaagactctattttatttgtctttatattcatggtctagcatggtccctagttcgtacatggttggcctgtactttttttttttttttttgagacggagtcttgctttgtctccaggctggagtgcagtagagcgatcttggctcactgcaacctctgcttcccgggttcaagtgatcctcctgcctcagcctcctgagtagctgggactacaggcgtgtgccaccatatccagctaattttttgtatttttagtagagacagggtttcaccatgttggccaggatagtctcgatatcctgaccttgcgatccgcccaccttggcctcccaaaatgctgggatcacctgtgtgagtcaccacacccggccattttttttttttttttttgagatggagtttcactcttgttgcccaggctggagtgcaatggcacaatctcggctcactgaaacctccacctcccatgttcaagcaactctcctgcctcagcctcccgagtagctgggattacaggcatgcaccaccactcctaattttgtatttttagtagagatagggtttctccatgttggtcaggctggtcttgaactcctgatctcaggtgatctgcctgcttcggcctcccaaagtgttgggattacaggcctgagacactgtgcctggctggcctgtacttattaaacattttaaatagttgctaggttgtatcagaaaaacttgagggctgacctgcaagattagtcacttttacaatgtttctgtggggggaatttatcttcttttggtaggatattagaaaatataaatataactgacttaaatgaacttttaaaattcaattcatatttaagttaggaactgcccatcatatgattgaaatatttatatgcatctagaatttgatagttttaaaacttgagtgagtactgtaatccaaatatcattgcatagagcaaataaagcattccccctattcttagctgtaaccctgtctctgaagaactaggggaaattgcatggatgatttaattccattatcctctctaaagcctcccaaaaggttagtgggtgttatgagaagctaaacgtctgctgtgctttaacataatttaagtaatcacatgtgactagtggcccccatattgtatagcacagctctaagttaagtgttcagacttcatcctttactaatagggagccattgaaagtatttgggcaggacagaggagatgactggatttaaatttaacacatctcattagtaggtgtgtataggtgggagaaattgtagggagctacctgacagtccaaaaagaaagattatttgtcttaattaatggcagatgggacgattggatgaatatttaagtacagaatcaatgaacttgattttgtaattattttgcttattttcttatattggatcatgaccaacttgatggcaaagtctatattataataattgtggtaaccaacatgttttgagcatttgctaaatggaaggcactgttgagtgccttttgtgcattatctcatttagtgctctcaacagcccatgaggtaggaagtattatcttcattttacagacaaagaacagctcagagaggtgaagtaacctgttgaaagtcacacagatagtaaatgcaaagagatttgagatgaaaagagtaaaatttaaaatcaggtggcaaaggagatcatgaaacatttagatatgtgtagcatagaacattactgttttgtgggagtttcctgatttgggcacatagtagattatgaaaataatttttattgatacttattgagcatatactatgtgctaggcattctaagcccttgatatgggttaaattatttaattttcacaacagtcctgtgagacatcattatgttcatttttatagaggaagaaagtcatgtacaaacataggctgacttgtttaagaaagtaacagagcagggattagagtccaagtaatttggctccagcactcctgcactacttaatacatttgtgtgttgtgttagtaaataaatactgtacaaatggcaagataggccagacgctggtgtttcaataaagcaaactcatcttaaccatgaaagtgactcagcttgagatttaattaatattgtttctatgtgtgaggatctttctttttatggcctttggcagtaaaatgatctaagcgtttttatagaatgtataaaatgtggctttttttgtgtgttaaatactttatgaccttgagtttactgatcctgacgaagctcctcttttcctctttttgcccactaaagatccattttatttatgcacacagttaaagccattgtagtgtagtggaaacagcacatattggatttgtgtgttcttacattttaattccagcattatccattactagctgtgtgactggacaaattatacatctttagaacttcccttttctaacctgtaaaatgagggaaattaaatcttcttcattggatagttgtaaggagtaaatgggatgatatattttttaaatgcctgctgtactacttactgtatggcagatattcaaaaaattgtgagtgctttacttcttaataaatgaaacacctccaaatttaagtacttttttttcccttatagttgctcaattttgtaggtgaactctgtgcttgccaaacacttggtagccagacctttagaatttgaaccagatactatagagttcctaaataaaatatgcattagaagagaaatgcattaattctttatggtgttgtgtgactgttttgtgtcttttgccaagaggtaattctctgctgtatcggagaggaacaatggtaaggaaaacttcagcttcttgtgtttctggagttctatcttgaatggataaatgaatgaataaatgaatcacattctagttggacatgtaaaaagcaagtagtgaaacttgagaaaattctcacaaaaggtagctctttttctaaaatatttccttctgatttctcagtaatgatgtagagagctgtagtttacaagctgattttagaaccgtatattaatagaaaaagcaaatagacaaaaggtcagtagtccctgcatattctgggaacattcttttagattttgatttgtagtgtaatgcttttatttcggggaaataagttccttgagtttcctttaaccaagagcagtacttaagcaatgatatttaatgactacataactgagactcctaaatcacatattgaaatctgactgacataaggaagtattgaggaggcaaaggaaaagaattgagcatcattttttgagatacagttaatgtacttaaaaatttccaagggatcatagttttttttcaattcagctttattgaaatgtcacaaagcattaaaatgcacagattttaagtgtcaaatgtgatgaattttgatacatgcaaacatttgtataaacactactttagtcaagaaatggaaaatttccatcacctgggaaagttccctctgtgcccctttgcagtcggtcctcccagaggcagccatgttgtctaatttctgttaccatagactgctctagaacttcatataagtgatatcaggctggtcgaggtggctcaacctataatcccagcactttgggaggccaaggtgggaggatcacttgaggccaggagtttgagaccgtaacaagaccctgtctctacaaaaaatacaaaaatacaaaaaatacagcatgatagctgtaatcccagctacttggaatgctgaggcaggaggattccttgggctcaggagtttgaggccatagtgaaccgtgattgtgccactgcactccggcctgggtaacagagtgagaacctgtctcataaataaataaatacacaaataaatacatgaataaataaataagtagtatgtgctttgatgcctaacatcttttgctcaatagatttttgaaaaatttttttgtcattgtaagtatcaatagttcatttttattcctggaatagtattccattgtacgaatgtacaacgatttgtttatccgttaacttgatagaatttttgttttcagctttgggctattataaacaaagtttccataaacatttttgtacaagtgtttttgtggatatttgtattcatttatctgggagaggaatggctgggctgtttgatatgtgtatatttaacttaaacttttctaagtggtgatcctatttcatactgccaccagtaatgtatgagagttacagttactgcacgtcttcactaacatgatatagtttttctacttttagccattctagtgggtatataatagtaccttatttggctttaatttgcatttctctggataactaatgatattgatcacagattaggatgctgtttggccgtttgtatattcccttttgtgaagtgtccaagctttttgcccatttttaaatcgaattgtctttttgttattgatttgtaggagatctttatgtttttcatacaagtccctgagaatattttcagccagtgtggtttgtctttccattttcttttttctttagagtctcactctggcaccagaatataggtttcacaagtgcagagattttcatctttttgtttgctgatggcatgtgtcactcagtggcacgatcacagctcaccccagtcttgacttcctgcgctcaagaattcctccaatctcaacctcctgagtaactgagactgctggcatgcgcaaccacaccaagctaatttttttctattttttgaagagatgggatctcactatgttgcttaggctggtctcgaattcctgggctcaagcgattctctcacatcagcttcccaaagtgcaggggttacagtcgtgagccactgcacccagcctccattttcttaatagtgtcttttgatgagtagaagttttaaattttgattaataccagttatcttttttttctttttcagtttatgatttttttgtcctagctaagaaacctctgtttatccccaggtagaaaagtgattcagtctagtgttgtctttcttgtctgtcttgtcttgtcttgtcctgtcttttttctttcctttccttttctttcctttcctttcctttcctttcctttcccttcccttcccttcccttcccttcccttcccttcccttcccttcccttcccttcccttccctttcgcttcccctccccctggccctcccctccccccctcccctccccctccccctccttccccctcccctccccttctccttcccttcctttcccttccctttcctgtcctgtcctgtcctgtcttgtcctgtcctttccgagatagagtcttgctttgttgctcaggctggagtgcagtagcatgatctcagctcactgcaacctccgcctcctgggttcaagcaattctcatgcctcagccccccgactacaggcttgtaccaccacacctgtctaatttttgtatttttagtagagatggggtttcgccatgttggccaggctcgtctcaaacccctgacctcaggtgatccgcctgcctcgggctcccaaagtgctggaattactggcatgagccactgtgcctggtgtattttcttctagaaaatttgggtttcagtttttatgtttacgttaatgatccatttccaatttgatttcatttatgcatgttactcttaattcatggaacaaatatttattgagcactgtctcagtaccagccactatttaaggtactggtgttcattagtaaacaaacaaatgaaaatctctgcacttgtgaaacctgtattctggggaagtgacaaaaaataaactgataagtaaattatagatgaaaggtgataaaggaccatggtggagggaacatgataaggtaaggtaaaggggtggtgaggtttctggttttaagaaggagtaaaaataggcctcattgagaatatgtcatttaaaaaatgacttggggtggggttgtgcatgatcagtccttcaacactagaaagatggcagagcaagagcaaagaaaaatccatttggttccagaaaatctcctgaaaaagaggaaggcttatcaagccctcaaagccactcaggcaaagcaggcacttttggcaaagaaggagcagaggaaaggaaaaaggctcaggtttaagcgactggaatcattcctacatgattcctggaggcagaaatgtgacaaggtgcatctcagacgactagaaatgagacctcatgccttggaattgccagataaacatgccatggcctttgttgtacacatcaaaaggattaatggcatgagtttaccggtggagagaaccgttgtaagacttcgcctgaagaaaatgtttagtggtgtctttgtaaaagtcaacccccagaacctaaaaatgctgcttatagtggaaacttatgtgacctggggatttccaaatctgaagtctgtgcgggaactcacttggaaacatgaacaagccaaggtcaagaataagaccatccctctgacagacaacacagtgattgaggagcacctggagaagtttggtgacatttgcttggaagacctcattcatgaaattgccttcccagggaagtatttccaggagatctcatagttcttgctccctttccaccttttggtgacccatcatgctcaggctggagtgcagtagtgtgatcttggctcactgcaacctccactatataccaaaaatatagtgggcttcctcaaggagatgggctcacatggctatcggggtgaatgcatcagtcagctcatctgccagctgaacaagacccagaatatttgaaagcacagtgcagtggaagcatgtgtttttgttttggggggaattatcatcaggtatcttcagagaagattattccctgccttatcttcaaaaatcggaaaggaagggttaaaatatagtggcttatgttcatggcaagcacctctcatcacagtccagttctaaggaaaaagtccagtgttttctgtattggctgctgcctcgtcagaaatcagcacatgccatggaaggagtcctgctttgttgcattttctatcctagggtttattgttggtaaatgagtaactcaagcatttgtacaaggttccctaagactcccacagcaatggaccaagcccagggacataatttaatctggagagtcctggggccttgttttgaaaagacttgaaatacacataagaagaaaggcacataaataaatgttcagttgtccagaaaaaaaagatgagggagtagccattcagatacctgggagaagagtgttctgggtagagaaaacagccagtgcaaagtccttagggtgggagcatgtctggcatgtcccaggaaacagccagaaggccagtatagtacagggtaacagtggacaaggttacagggatatgggagggcaaattgtttaaacttttatagaacattgttaagattttagctctttgagtgacatgagaagccatttgagagttccatatacttaatgtacattttaaaacagcacatatgtactcctaaatatcacttggagatttcatagtattgattctttaggtatctgcttaataggtgtagaagcattttttttttcctgataggcatacttaatattataatggttttgttatttcagaaagatccagattacctgaagctgtggttggacacttttgtttctagctatgaacaatttttagacgttgactttgaaaagctgcctaccaggtatgtagaaacgctaatttgtaacccctggatgagtttttcatttttggcacaaagatttcattgatgacatattacaaggatggcaattatgttaccctcttgatactcatgaataaccctattctcatagagacatagctaattgatgacaatagtctttcttgatgatgccagacctggcttctagaaaactctgcttctctaggacactaccagctggtgttctgcaacacacttcatttctgacactaactaccagatcccacaagtaaagggcaaagtcctctgtaagactgccttcacttcagacattagccactacaagtcttcgggaccacccatacttcagaccaactggctataaattctgggttctcacacctcctccccacctcaagttcagtaactcactacactgacttgaaaaactcactgaaagcactatacttgtgattacggctttattgtaatgaatacacataggacaaggtgtggaagggtctggaggcagagcttccacgccctctccccatggagtcaggtgtgttgcccttcctgaacatcagcgtgttcactaatcaggaagctcttcaagttttgggtgtccagagttttattggagtcttactacataattgattatgtggttgagctcaatttccctctccctagaagtataagtggtggtgaggctgaaagttccagccctctaattaatgcttgttctttttttttttttttcttttttttgaaatggagtattgctctgtcgacaggctgtgcagtggcacgatcttggctcactataacctccacctcctaggttcaagcaattctcctgcctcagcctcccaagtagctgggactacaggcgcacgccaccatgcttggctaatttttgtatttttggtagagacagggtttcaccatgttggccagtatgatctcgatctcttgacctcatgatccacctgcctcggactcccaaagtgctgggattataggtgtgagccactgccccttggccaatgcttggtctttctgataggagcagccttctattgaaactaagggcttaccttgagtcacttcatttgcatagactcaggtgtaatccatagggcttattatgaataacaaaagacattctgaatatcactcagaaaatctcaagggtttttgaagctatgtgccagaaaactgggacaaagaccagatatatattctttattatacaataggcatgtgagttgaaacttattttcattcctggccttacagtaggaccttagaaaacatcttagaggaggtgaagtgtttagatttttagaaactagatttaaaaatcataaaatgaaaaaattcaaatttatggaaaagtactactgaaagtacaaatctttcatttttccacccaccaccactccccagttccataccatttcccaggcccactttttagataaagttttttctatatcttaagctatcttgaaggcctaatagttgttcagtaagagagattggctggggtaaaatgcaagaaaaatggagagaggcatctagccacaaaaggagtgccagtttaagataagtgttggccgggtgcagtggctcacatctgtagtcccagcactttgggaggttgaggcaggcagattacttgagcctaggagtttgagaccagcctgggcaacatggcaaaaccccgtttctacaaataattaaaaatggtggtgtgcacctgtagtcccagttacttgggaggcggaggtgggaggatcaatttggcccagagagttgaggctgtagtgtgctgtgatcgtgccactgcactccagcctgggtgacagagtaaaaccctgtctcaaaaaaaaaaaaaaaaagtgtgttgaggggagaagggaggaatggatggtggttgatgatgagaaagagtatctggagacttaaatcttcaaggaggaaaagtgtttgcattttggggatagaggtaggcaatcagaagtagtaaaggagaattgagtctagagaatcaaataggggccagatcatgaagtaccatgcatgcaatacaaatggactttgacttttttgttgttgttatggaaaataagagtgctactgaaaaattttctgtgtagagtgtcttgatcatcaagtttgtgtttcaaagtcactttagtggctggtggagagggttgagactgaaggcaaggagcccagttaagagataattgtgataatccagagatgtggccagagctttggaccaagatactgaactcaagtaaggatgtgagtgtactaaaaaaagactagtacttcgttatttataaatccagtttcagatgtcttcctcattagactattattcatgttaggtttataaagtttagggagtattaactcttgaccttttctcaaaataaaattatttattactacttttttaccaataaaataatattcttatgatttgtgcttagaaggacttctgttttaataatttatagcttgctttaaatcatggagctaagaattttatagagttaggatttgagcctttaaatgtttggaatattagaatgaagacttctaaagtttctaaggtgcagttgttatcatccatacattaccagtgtctcttttcttgggacactgtttccaaaaacattatgtagacttatattgccactatgtttaaagtaacatgaagaacgccaagagcattgctgtatttgtgatatagtttgtttacttaatactgtgtttcatgtttttgtcaaaaaactgaaacatgaatttaatttttctaatagaaaacattcagatttttaagtacatgctacgtacaagatattttatgaaattagtcaaatcaccttgaagataagggacatatggctaatcctcatataaagtaaactgaccttagagaattcataatgtaaagcagagatggcttttactagaatataaagcctttgaacttcaacctaggctgcttcctgtagtagacacagacaaccattggtttacagtagacattcaagagccaaacagaggaacagatttgtggaatttgggaaactgcaacaaaagaagcatagaattttgaacagtaaagtcctagaggtgggaaaatgcttccaagtccttaaatgctcataacgttaggaacatggccaaaaatttcaactttatctataaggcatgttcaaccaagccccaattttataattaaaaaaaatctttctgaggagctaatttttgtcctctttagtcattttttagaagctgattttttgactaattatttattaaaaccaatgtgcatatagagaatgggatgaccaagaacaaggaaatactcttttaaataagtaggataaaatactggaaaattgaatgttttctttcttgttgacatatgtttttggaaaagtgaggaggaatagctttgcttaattttgaaaattggttatatctgaatctttgtatattatttttagattacctctttttagccctttagcaggaaaaaaaatatgtatatatgtatgttaatgagatattttctggtactacctataaataagagaatgaaagaatccaaagctacaagtgaaatggtgccccaactaaaatgaaatatttgtaactgggttatagaatttggcattccttataatatgctttgtggcttttttctgtgtaatttaattacaatcaggtattcattttataaaacactttcttaatttatgttgtaggatggttcagaaagaagctaactgtattctacatgtgactacttatgtgcttcagatttttctgcatatagttaattaaacagccttttactcagtgtaaaaatactagcaatacttcatattaagcataagctgaagaagaggtaactataaagtataattgtcatttaatcataggcatgctttagggagctccattcagatttgggcatttttcttaaagggataggaaattagtatacagtggcttatgaaaagattctgaagctttagtgatagcatgtttaaaatatattacatttttatagatctttctatatttcacagctgaaaatgcatattaaccttctggtttgagacccctgtaaaatagggcagttgatactcaaattttataggttgggcacaatggctcaagcctataatcccagccctttgggaggccaaggtgggaggctagcttaaggccaggaattagagaccagcctggacaatatagcaagaccctatctcttaaaaaaaattgcagattacagaactagaaactttttttttttaaggaacaacagtagatatttatttatttatttatttatttgagacagagtctcactctgttgcccaggcgggagtgcagtggcccgatcttggctcactgcaacctctgcctcccgggttcacgccattctcctgcctcagcctctcgagtagccaggactacaggcacccgccaccacgctcggctaattttttttgtatttttagtagacatggggtttcaccgtgttagccaagatggtctccatctcctgacctcaggtgatccacccgcctcggcctcccaaagtactgggactacaggcatgagccaccgcacccggccaagaacaacagtagatatttactgttcaccgttctggaagctgggaagtctaagattaagacaccagcagatttggtgtctggtgagggcctgtcttctgtttcttgctgtgtccttacacagcagagggatgaatactgtgtcctcacacagaggaaggggcagggcaactcccttcactctgtttataaagacagtaatcccatccatgagggcagagccttcttggcttaatcacttcctaaatgcctcacctcttcatactattgcattgggagttagtttacaacatatgaaatttgggggaataccagcattcagaccacagcagttcacattgaaagctctaccattccttaaaaagtagacatataggtcggatgcagtggcttctgcctgtaatgccagcactttgggaggccgaggcgggcagatcatctgaggtcgggatttcgagacctgcctgaccaacatggagaaaccccgtctctactacaaatacaaaattagtgggcgtggtggcaaggctgaccaacatggagaaaacccgtctctactaaaaatacaaaattagcgggcgtggtggcacatgcctgtaatcccagctactcagaagactgaggcagcagaatcgcttgaatgcgggaggccaaggttgcagtgagctgagattgcgccattgcacctccagcctgggcaacaagagcgaaactccatctcaaaaaaaaaaaaacaaacacatacaagtagacatgtagttgcctgtagaagtattggcaaccacctgtcatgtactggcaacctacatgagaatgggtattttttcattcatgtttaaaattttattttgtatctgttttattaaaatattaacagaatattaaatattgatagaacatactacttgtatgataacttccattttttagatgaactctaagatgttggccccttcagttgtgtttctactgtccttctccttaggtcaatgtcttcaggtcttccacaagtcttttggacttgccaggatatttcctatctctcatttccctggaaatattaacctctctctgcaggtccctctgctgtaatgccttctgtggcagcacaggaattgtctacccattcaggttaggagcaatttttaagtatggtgtaaaaatctctttgaacactctataatagtgagagaagttgcagtcacaattttctatttctttctattttttttttttttttttttgagagatggtctttctgtctcaaccaggctgaagtgcagtggcatgatcatagctcactgcaacctcgaactcttgggctcaagcgatcctcctgccttagcctccaagtagctgggaccacagacatataccactatacctggttaatttttttttttccagtggagatgaagtcttgctatgttgcccagccaattttctatttcttagctgatttggcataggtttcaaccaggtatagacctcaggccagaaacaggtttataagaaatactgcatttttttcattatctgtgactcaacatgccttgattctaagcccacatctttcaggctggtaagatatccatgctttgagctgggcacggtggcttactttggagggccaaggtgggtggatcacgaggtcaggagattgagaccatcctggccaacatggtgaaaccccgtctctacgaaaaatacaaaaattaggtgggtgtggtggcacgtgcctgtaatcccagctactcgggagcctgaggcatgagaatcccttgaatctaggaggcggaggttgcagtgagctgagatcgcgccactgcactccagcctggcaacacagcgagactccatctcaaaaaaaaaaaaaaaaaaaatccatgctttgttatgccttggattttctgccatccccagagatgatagggttttatttaagccactgatttttgatggggagggagggaggtattctctggttttggttgtgtgaccacaggagtgaccttccatacatctcttgtgctcatctgcgtagcccacttaaaaccatctcctctcggaacacagatttattatttcatgaggttgggtacttcagcgtccatagggaacttcaaaggttaaatgatcagctctatgttacagaggtgagatttagtacccatgtctttagacgttgaatccaggtatgggtttttattatgaaagaaacaccagaggaaccactcatgtctgatgttggcatttgcccttaaagaaccatatagtcttacatagaaaccatttgtcacaaaatgttgatatattactttttaaagtcttctgttgatgcccatgctcagagctctacatttcctttttttttttttttaatacccttttatctctcttctttccttttactggttatcttttctccctcttctgatcacatggcttggggagtctatactaaaacaatgatgtttagtaaagcagttgacaaattttttttttttgagacagagtctcactctgtcacccaggctggagtacagtggcacaatcttggctcactgcaacctctgcctcccgggttcaagcgattcttctgcctcagcctcctgagtagctgggacgaatttataaatgtgggaaatgtgataacctataggataattacacttcatttggtaaaatgatacaatgaaaccagctaattttttgtatttttagtagagatggggttcaccatgttgaccaggctggtctcgagctcctaacctcgtgatccacccacctcggcctccaaaagtgctgggattacaggcgtgagccactgcacctggccaacagttgacatattaaactagttatgtagatacttcatttttactttacagttattgtttcttttagaaatggtatgcacactgctatacacagtatttagtatacatagtatttttaagtggaacataatttattctaagtattttcattaaaaatagtacaattgaagatatcaaatagtctgtctctctctttagtaagcctcttctgaaataagaaaaaccactctgctctaataatcttctagttactaatcttctagttacttctagttactaatctagttactaatcatcatgtgctacatctgtgttgcagacgagaaggcacagagtatctggaataaataaaagagcttctttaggatttgggctgaaaatgaagttcatttaaatgccagagattttcttcttgtatttcaacaggcttcttatttttttccctttctgttgtagggtagatgatatgcctccaggaatatctctgcttcctgataatattctgcaggttctgaggatccagcttctacagtgtgttcagaaaatggcagatgggttagaggaacaacagcaagccttgtcaattttgcttgtcaagttcttcattattctttgcaggtatctagtagaaaaaataagctagttttcactcataggtgggagttgaacaatgagaacacatggagatgaggaggggaacatcacacactgggcctattggtgggtagggtgctaggagagggataacattaggagaaatacctaatgtagatgatgggttgaaggatgcagcaaaccactatggcatgtgtatacctatgtaacaaacctgcacattctgcatacatatcccagaactttaataaattaagtaaataaaaaagaaaaaaagaaaaaataagctaattatctgttttaatataattgttacattaccaaaataataattaattttgtttattattagtgatgtttgtagttgatatggagctttaaagagtaagtgcactttttggaataggcttgtggtttgttagtatgttggaaatccttttagttactatacctagttatagcaacattagccaacatttaaaaaaattatattaaagtcaatgacagtttttcttcagcaagaaattactgtaccagtatttttcatatggttctcacctgtaaatgtatatgcatttttattactctgtgttattatctgtgaaaataaatcattcagatatttcattttattattttatcaaataaagtataattatcctgtaggttatcatatttcccacatttataaattaggtctgtggtgcttacattttggtatgcatgaataacaacaaggaaacttagtagaatatagagcttgagccttgcttatggaaattctgtttcaaaagggctcaaaatctggatttttcaggcattccacattcatctacatgtaagaattcaagaaccattagtttaggggcactgcatataagaattcaagaaccattggtttaggggcatctgcatataagaattcaagaaccattggtttattggttcatattcctcttgaaacctatcttcatttcggaagctacattctatagctttaaatctattttctttttggaagccactttctaaaacatacattatttgttttataaatattttataattaattagtggatgaatagggacttaatttacctcttagtcacctttggcttaatttctcattgcctttgcaggaattatggaatgattgatcaataattgctaaaacatttcacccctaatttatgctctcccagagccttagacatgtttttatttgtgtgtttttcctcatccttaaaatttggaaaaataatacaagaattataagggttgaagtatgcagccaggtacagttgctcacacctgtaatcccagcactttggaaggccgaggaggtggatcgcttgaggtcaggagtttgagaccagcttggccaacatggtgaaaccctgtctctccaaaaaaatgtaaaaattagccaggcatggtggcgggtgcctgaaatcccagctactcaggaggctgagaggcaggaaaattgcttgaacctgggaggcggaggtttcagtgtgccgagatcatgccattgcacttcagcctgggtgacggagcgagactcttctcaaaaaaaaaaaaaaggttaaagggaaagggtttattcaggtagtaagacataagttgacctctgataatttgctatattttcctgctagctacctactacaattttgctgaaatcaaaaatcctacagatatttgttttcaattcattatgtttagattttggtaatagagggaagcactgaaatgctcaacaaattttttggttgaaaaaaaattttttgggtagtagatagtttcttatgataaatttaatgttcaatagctaccagtcacagaacatgtttctatttccagagacctcactttacttttttaaagctccatttaaaaactttaataaactttatgttttagagctgtttttatataaatctagaattcccacatactcctttcccatacccctcagtttcctctattactaatatcttacattagtatgatacatttattacagctgatgaaccagtatttatacattattaactaaggtccatgtgcacattagggttcactatttgtgttgtatagtttcatgggttttgactaatttatgttgtcatatataaatttgacataatcatcattataggatcatatagaatagttttcctacactaaaaatggcctgtgctccacctattcattccttacacacccacacacacacaccccatacccctgcccgccccaacctctgtcaaccactgattttttttttttttaatcataagcataccaaatgttacaggtttcattgtcaccactgcaatatgtgtactgtgatggaagcatagcctgtgtctcaatttagccacataaagttttttggacaccatgatcagcagtacccattctcatctagaatgaggcttaaccactgatattttaatggtgtctttagttttgctttcaccagggtgtcataattagaatcatacagaatgtagccttttcagactggcttccttcacttagcagtatgcatttaagggtcctccatgacttttcttgtttgtttgtttgtttgttagacaaggtcttactctgtcacccatgctggagtgcagctgcttgataagggctcattgcatccttgacctcctgggctcaatttatctttccaccttagcctctgagtagctgagactacaggtacatgccaccatgcccagttatttatttatttatttatttatttatttatttatttgtattttttgtagagaaggggtttcgccatgttgctcaagctggtctcaaactccagggctcaagtgatccttccgccttgacctcccaaggtgctgggactataggcatgaaccaccgcacctggtcctcctccatgtgtttgtagcttgatagcccatttcttttgtcacagaataatactctacttatggacataccacagtttgtttattcattcccctgttgcaggacatcttggttacttccagtttttggaagttatgaataaagctgctaaaaacatctgtgtgcagattttgcatacacataagttttcaactcatttaggtaaatgctgaagagtataattgctgtatcatacggtaagcttatgtttagctttgtcagtgcaaaattgtctaccaaaatggctataccattttgcattcccaccaacaatgaatgagagttcctgttgctcttcatggtttccaatactggattatactattcttttatattttagccattttaataggtgtttgtagtatcttattgttttaatttgcaattccctaatgacaaaagatgttcaccatcttttcatatggctatataccatttgtatcttctttggtgaagtgtctatttagatcttttgctcatttttaaaaattgaattgttttcttattaagttttaagacatctttgactgttttgagatgtaattcctttatcaggtatctgggttttttttgtcgtcgtcgttgttgttgttgttttgagacagggttttactctgttgcccaggtgcagtgagttctgttgcctgaggtgcggtggcatgatcacagctcactgcagcctcaagttatcctccttcttcagttccccccaccccaagtaagtgggaccgcaggtacatgccaccatgcttggctgattttttttaattttttgtagagatgaggtctcactatattgcccaggctggtctctaactcctgggctcaagcgatcctcccacctcaccctcccaaaatattgggattacaggcatgagccactgtgtctggcaggtatctggtctgcaaatattttttgatagtctgcgacttgcctttttattcttttaatagtattttgtaaaacagaagcttttaattttaatgaagtttgacttaacttttttctttcatggattatgcttttttaaaaaaattgagacagagtcttgctccatctgtacactccaggctggagtgtactgacatgatcatggctcactacagcctcaacctccctggctcaagtgatcctcccacctcagcctcagcctcctgagtagctgggaggcacaccaccatgcctggccaattgttttaaaaaaattattgtcctgctggcggagtgcagtggctcacgcctgtaatcccagcactttgggaggctgaggcgagtggatcacttgaggtcaggagttccggaccagcctggccaacatggtgaaaccccgtctctactaaaaatacaaaaattagctgggaatggtgccacatgcttgtaatcccagctacttgggaggctgaggtggaagaatcgctttaacccaggaggcggaggttgcagtgagccgagatcacgccactgcactccagcctgggtgacagagcaagactcagtctcaaaaaaaaaaaaaaaattttttttttcaaattattgtcttgctacgttgcccaggctaagtctcgaattcctggattcatgcagtcctcctgcctctgcctctcaaagtgttgggattacagacgggcatgagccactacacccaacctctttttctttttctttttcttttgctcaaattgtgggtctgtttcttttgtgtattgtttcttttgattttcaaacttgtgtcgccttctcatgtgagttgttatttttgagtaagtgttggttattgtttttgaaaaatcatagagatacttttaggataatattgtctttcttctcagttaatatacatttgtttttggaaaagtaggatccctctaatacagtgaatgattgagctgacttggacttagtctctgtgactactaatctattttcatttcacctttacttcttgagtgttgtcttttgggatcttaaaccacagccttagagacagtcattttcaggctctgaattctagtttttgtcccttttcaacattgtgagactgtcagatgcaatcagcagcttctcattgtttcatctacctctgtcaggactggtagaagtcatgagtgcaaaaatggatctaaatgcaggtctcatctctttctgtgtttccttgttctgtatcttggatctgtaatttttcacttccttattaattttctcatgcctttaaacagatttttaaaaaaagttttgtccatgttttctagttgttctcagggagaggactgatcttagtccactattattggaagcagaattcttgcagaggcttccaattttgcctctgcctgtaccctgttttctccaagttgtcatgccagtctgacttcttacattaagaagtcttttggttgggtgggtgtggtggctgacacctgtaatcccagacctttgggaggctgaggcaggaggattgcttgagcccaggagttcaagaccagcctgggcaacaaagtgagaccctcatctcaacaaaaaatgtaaaaaggtagccaggcctagtggcacatacctgtagtcccagcttctcaggaagctggggtgggaggattgcatgagcccaagagtttgatgctgcagtgcactgtgattgcaccactgcactctagtctgggcaaccgagcaagatcccatctcttaaaaaaaaaaccagaagaagtctgttaattctgttaatttttctaaaattagcatttactggattttaagatatatgttttacaagatcacaatatctcataacaaaattaatgaacgttgcttttttattatgtcaagggaaagattttaggtatagtaaatattgtcttgttttacctcagtcttataaaaagggaataaaaatgagggaccatattttagttaaacactaagcacttatgaacccactgctttaaacaaaatatgatactgtgccgtcttagagtaagtaaagatgctgttagccctttttcaaggacttttaatgtagttgaggaaatatgacatccttaaaaggaaaccgtaattcaaaaagcaaagtgaaaatgattatagtgcacatgttataatgaaaacagtatgtacaaaaaagaaaactaagaatctgcatagggacaaaaatctgtaaggaaataatgtagatgtacatagttgcttatttttagattgcaagatattggtgtttattttttctcttctgtttctactttgtgatattttccaattttcaataataaatagatgctaatcagcatatactttttaaacattatctgtttatagtagttaaatgctgcttgagttatagttcacagttggtgggaaagcagttatataaccatattgatttttatgttttaataaatgtcatttgcattttgtttgccagcatgtgttctcataattcaagctgaattcatgaacatatgttttgttcaccattcttatgtaaaaaattaaagtctctttttctcacagaaatctatcaaatgtggaagaaattgggacttgctcgtacattaattatgtcatcaccatgacaacactctatattcagcaagtaggtgtgaactaatcttttttgtcactttactgagaacaactaggttttactttttgtttgtttgtttgttttgagatggagttttgctcttgttgcccaggctggagtgcaatggcccgatcttggcttaccacaacctctgcctcccaggttcaagtgattctcctgcctcagcctcccaagtagctggatattacaggcatgtgccaccacgcccggctaacttttgtatttttagtagagacggggtttctccatgttggtcaggctggtctcaaactcctgacctcaggtggtctgcccgcctcggcctcccaaagtgctgggattacaggcatgagccaccattgtctggcctactattttttatattatagttagtatagttaaatattttcagacgaggtaataattgagaagagacttaaacttattgttgggtaatgcatatttcagaaatcttgtacatattacctaaatatagacaagtagttattatatatactgttatttaatttaaaaatttaagtgttttataaatggcttttaaaatgatacaatttgtgatttttatgtattatttatttatcacatatccttcttactgaaaacatattactttttcaaaaggtgtttggctatttattttaaagctatcgtaggacatatttaaaatcttagtggctgtatccagtccatatgattaaatgactcttagtctcaaagggaaagtttggcttgtttgaatacaaatgacttattgttagatgataagtaaggcatgtctttaatttatgtttaactttgttctcagttaaaaagcaaaaaaaaagagaaggaaatggcagatcagacatgtattgaagaatttgtgatccacgcattggcattttgtgaaagcttatatgatccatatcggaattggagacatagaatttcagggtatgtcttataaataataacgttcatttaaaacctgaatgtcataatatatttgattcttcaaagcaggtcttctctatgaaagcaattggaaagaagtatataagacccacagatttaactctgagctagagaaatatgttggagggaatgaattagtgataaattctgcttctgaataattacatatgccctgaacttgtattttgcaatgcaattttgaatactaataatctgataagaaatgttaaaggcatagtagcatcaaatacagtatacatatttttcaagaaaagttattttttaaaaaacatactttataattcgaaaatgctttctagcagtattttgtccattttttttcttttttcttttttttttttttgtttttttgtctttttgagacagagtcttgctctgttgccaggctggagtgcagtggcacagtggcatgatttcagctcactgcaaccttcgcctcccaggttcgagcagtactcctgccttagcctaccgagtagctgggattacaggagtgcaccactgcgcccggctaatttttatatttttagtagagacgggatttcaccatgttgaccaggatggtctcgatctcctgatctcatgatctgcctgcctcggcctcccaaagttctgggagccaccgtgcccggcctttgtccatttatttttaactgtagagcttctgtcatcaggatcccataaggaaaacataaacgagactaaatatttttatttttagacacgagatctcactatgttgcccagactggtcttgaattcctaggctcaagtaatcctcccgccttagcctcccaaatactgggattatagacatgaaccactgcacccagcctcctcacacttggtattttaaaagagaggatctaatacaaggaaattgataaatattagagaattgacaaagcaaagatgggacactgactttaggaaacagctactctccctggggttatgggaacaaagggaagagaatggagttatcagaatctagacttttggagaagaggccctacagcactgaggttcagacctctgaggaaggagcattgcacagctggtgctgatatctcttgagcagtcaagaggctcattctgggattgccaaaaataagctgaagacaggaaccaactgccattactacaattaagaattcttgctggagtgatgctgatgagtatagagaaaaagagcaatgtggaaccagttgttgctctctttcttccacgcttcatctggtaccctctattagggagcccaaaagggaggcagctggaaaaagaaagtttgcatgatgcctgccgcagcatcacaaagcagagagaatatagaagggtgggttggtagcttagtgacaatagctgaattaccagtacagaactcaaagagaagaattttaaagtcacatatcattcttacctgtgggcacagattacaaagaagtgtttcatcactctcaatcagacctcttttttaaatctcctaaatctcctcaagattttccattttcattttcaacttaacatgacccatttgtaaataatttctacttcctgcaacacgattgcagcatttcattactaaattatttttgtaggcttttcagggttcccatggtagtatagccaccataccattagatgatggtgaagaattgataactgagagaacatttatatatactatgtggtaacaccttttgtatgttctatatagtgatgtaatattttattgaaatcagaatacatcctgggagatggagattggaaaaatgttggttaaagatacaaaatttcagttagacaggaggaataaattatgcttcagtaacaaacaaggggcttagaataacaaaagatttattactttttcatgttgtctgtcttttgtgaataggcagagagcctctactcatcagagctactaaagatcccaggctaacagagcagccagcattttagcctttgctggtcaccatgtgtgagagaaaaagttttgaaaggtgtcaaattggcaatttaatgttcttgtcttgtctggtcatgctacatgacacatgtcattttcattctgaactcattgtccagaactgtgattacatgtccccatctactacagtggggccaagttaaaatctaccatgtgactagaacgggtagaaatagttgtcagttagtgccgtgactaccttttatctctgcttatgccctgcttatgagtctttaaagatacaaagagggagccggatgtgatggctcatgcctgttgtcccagctactggggatgccgaggtgggaggactgattgagcccaatagttcaaggcttcagttagctatagagacctgtctttttttaaaaaaagtacaaagagacacttaacagtgcttcatctgtagcctttatactcattagcactttggttctaactaatcagtgttccccctgttttgacatgtatgccagagatttctctaaggaaagtatatctcctcctcttcctcctactcttgctacttctctatcctccgccttagacttgtcagcaatggcaaatctaagagaacattttaagttttgaaacaatgacataatttttctttatagacagcaagacagatacagaaagaggaacataaaatcagtctgaaaatggcagaagagaggcttttaaaggaatctttaataataagagcaaaatgaatttaaagatggggagagaagatttataaaaaggcagctctgataacaaattaaataaaattggtagctaaaaacagtttttgaaagtcaaaaagaaaatttttttgataataactattaaaaaggaaaatataataaagattattacaccaaaaaagagtcattttcccatataaagtagaaaacatatacggataaccaaaacttgccacatgaggccagtcagaaaattccaaatattaacaaaaacacatttttcactggcccattaatcagagaactttaaaaattacataaaaattaaaattacctccgtataggaatacattttaattcacccagagatccaacacacttaagagagaagaattttactaatttaattttttaaaaaaccactacctattaaactcatgtagcattgctaagagtatctacggaattttcacatcgatgttttcttgcgaaagtggaaatcaaaagcacagagaccctctttaacaatgaaccgctgataagcaaaatataattataataacattccacttacgtgcatttgtgagcattaatttacatcaggctttccaatttaccaacatttatagaatttcttactagtgagagttttacaaaacttttgaagtaattgttaaatttgaaaacatttctgtattttccagaccactgtgcttccaatccagagtgctctcacatttataaggtccatctacagtttgttaccatgtgtctttgaacatgtgttagacaaatgaaggtattctcacactctgtacatttataggaatttttcaaaaatgagttcttttaagtatcaaatgaaacttatgaactaaagaaattactacacatttaaatttataaggcttatctccactgacttcttacatatttcaaggaaaaatggaaaaactgaaggctttgccacatttcttagaattacagggtttttctctattgtgaacccttttatgtccttgaaagaaactggggaaactgaggactttaccagtttttttacattcatttttcccccagtatgagtttttcttagttttcaaagggaactgggaaaattgcatgttttccaatattcctcacaatcccactatgtgttttttcatttgttctaatagaactagaacatctgaagtctttaccacatttcttacattcacatggtttttttccagtatgacttctttcatgctgttgaagggatctgggaaaagtgaaggctttaccactttacttccatccaaagggtttctcttcagtttgagttctttcatgtcgtcaaagggaactggaaaatgtgaatgatttaccgcattttttacattcctaaggcttttctccactgtgagcccttgtatgcttatgaaggaaactggaagctgtaaaggctttaccacattctctacatctatagggtttctctccagtatgaatcatttcatgttctcgaagggcgtaggaagaagctaataatttatcacttttattgcatgcatagggtttctctccactatgagttatttcatgtttgtgacagtttctggaataattgaagtctttaccacaatgtttacatttatagggttgttttctccagtgtgagttttctggtgcatttgaaataaactggggaaaataaagttttccccacatactgtacatttataaaatccattatcactgtgcattaccatgtgtcttcaaacacctgtgagagaattaaaggctttcccacattgtttacatttatatggcttcatttcacagtcctcacactcaaatagtttgtgtccagagtgagatataatatacctgtgaagagatgcatgacatatgaagacttttccacacattctgcatacacatggttttactttagtagaaactttcttgttcagattaagatttgaattctggctgaaggtttctccaccttgactattttgtttaccttcacacagtctctctaccatatgacttacatttctcccatattttctgacttgatcgtcaacattctggtcttcccatttgttttctgtagaagccaaattcctgaaggtttcctgcgtcacatctctataagagtttcttctgggaaaaatccagcaacgcccactcctgaggggtgaaggttacagccacatcctcaaaagtcactgagtccatgttccagcttccagcatgctccagcatcctgcccagggatcttgcagggcctgcaggtcacaggcaacagaggctgccccagaaccacctaaggcctctcagagctgaggagagggagcccaagctaggagcgcagcccagagacccaaaaagaagaaaattttatatactattaatataatataggaagataattctgcatatgtaagatggcaacagaaaggggggcaaagtagaggatgagtagcagcatttaatgaatgtatgcatatatttgccaggaattacattagaagctgtgtatgtgttatctctaatatacacaacaatcttgccagtaatgtaagaactgcttcaaagacaaatggtaaagcagggaattcagacttggatttctttgactttgacagggagattaaaaaatggaattaggagaaatccattgctcatggaagacctatacaaagggatctacagcaataatttacaccttatttattaatctgattctgaaattaagtggaaatttagaagatatatattttcttattcattgtgtttaatgcttaccaaaatagcgaaagcaggttagaatagatttaattaaaattaacataattccaaatacagagccatgtaaaactatttcttttcttatttgatgacaacaaatagatgctttttgtagatttgattaatctgttatcaattttgattctacttacagaatctcagaaagttagaaagattttctcaagtggaactaaaataagtgtagggaaataaatcagccaggcatggtggctcacacctgtaatcccagcactttgggaggccaaggcaggagaattggttgaggccaggagtgtaagaccccatctagaaaaaaaaaaaattggccaggtgtggtgatgtgtgcctctagttctgagtacttgggaggctgaggtgagaggatcactgagcccaggagttgaagcctgcagtgagctatgatcacactattgcattccagcctgggtgatggcaaaacctgaaagaaagaggagggagggagggagggagggagagaggaaaggagaggagaggagaaaggagtggaaaaaggaaaggaaagagggagcgagggaaggaaggagaagagaagtgagagaagaagaaaggaagaaaagaagaggagaaaagaaaaaaagaaatcttccttcaatatgacttgttcattcatttaaacattgattcaaaaatatacttattgagtttctactttgtgactagtgcaagtttagtaggattccttgccttgccacagagaaaaataatttaattatgttaaggtatgccctgtgcctcctacttgtcaaacctggaacaatatatgcacaaaataattatagtaatgaattatttaaccattcaggaagaaaatttatgagttcataccagtgatagatagataagggagaagtgaagggtgttgcttacagtaaaattccaagtgccaattagtaaatatagaggagatgctggagttggggaaaaaaaacacattttgcacacatcattgtaagattggatcaggcaagaatcattcatgggtgttaaacctagggggaagttttagttgggagcatgatgtgtgtatggtttttttgtttgtttgtttgttttgagacagagtcttgccctgttgcccaggctggagtacagtaccgtgatcttggctcactgcaacctccgcctcccgggttcaaacaattctcctgcctcagcctcccaagtagctgggtttacaggcgtgcaccaccatgcccagcaaattttttatttttagtcaagacagggtttcaccatgttggccagactggtcttgaactcctgacctcagttgatccacctgcctcagcctcccaaagtgctaggattacaggtgtgagccactgcgcccggccatgtgtatggttttaaaatgtctccccacgattacttattacttgtaattgaaaaatcagtaattattttggacagtactgggccaaataatccagttggttggatgatcaaaattaactgatcatcagtaagaagtagtgggtatcatgtgctccacatgtgataaccctaagaaggacacttcattgcttatgtgttattccagccaagcatgcataatctgaatctaattgtgagaaaacaagcaaatcccaagtgaagaacattctaatttttttaaaaaaaggagggctggaggacaactttctttaaaaatatcacaaagtggggttatggaaatgtttcagattaaaagaggcgaaagagacactgaatgcaatacctgaccctggcctggaagctgtattggaagagggaaatgctacaaaggatgttagtgggtgaactgacaaaactggaatatggttggtagattacatagaagtattgtaccagtgttaaatttattgaagtttataactatactgtggtattatataaaactatatccctattagtaaatattcactaaaatattaagagaggaaggaccatgatatatgtaatttcctatatataatggggccctgcacagtggctcatgcctgtaatcctaacactttgggaggctgaggtaggaggatcacttaaacccaggagttcgaggccaacctgggcaacatagcaggaccccatcttcacaaaaaacaaaaaaaattaactgggtatggtggcttgcacctatgatcctagctttgcaggaggctgaggtgggaagatctcttgatcccaggagttagaggttgcagtgaactgggatagcaccatttcactccactctggacaatagagcaagacactgtctctaaaagaaaaaaaaaatttgggataaagtgttaacagtgaacttgggtaaactctattttgatgttctttgatctattcttattgttgcatcttttgccagaacttgaactttttccaaataaaattaagaataatgattatgtcctaggtatgatgtgagtacaatgattatgtcctaggtatgatgtgagtacaaaaaagaagcatggtggctggggcgcggtggctcacgcctataatcccagcactttgggaggccgaggcgggtggatcacaaggtcaggagattgagaccatcctggctaacacagtgaaaccccgtctctactaaaaatacaaaaaattagccaggtgtggtggcgggcgcctgtagtcccagctactcaggaggctgaggcaggaggatggtgtgaacccaggaggcggagcttgcagtgagccgagattgcgccactgcactccagcctgggcgacagagtgagactctgtctcagaaaaaaaaaaagaagcctggttaaatcaaccaaaaacataaacttagaaaactgagatgcaaataagcgttttacagccctctcagaaactggttgatatgtattagcatctgctaaatgctagatgcttggcccaaatatcaagtaataatggagcaattaactatgctatattctacaaatggtataagactaaagttcatttttagctctactaagttattgaaaacatgcagtacaaactacttgtgctttaatttttgtgttctaatatatgtaatagttctcaccccttttgtttatgttagcatattaaattcttaccacaaatatattggaaattatgttcatatgttacatctaatacaggaactttagaatgagtcattgatcacaaattgtagaagtacatttttattatgttaatcaggtgaggatgtttattgtttgtagcataggttgtttggataggatataagcaatctattaataccataatttttaatgaatgcacaaactggaaataatctcgtggaaaaacctaactgaaagctaaattaaattttatcctttttttttttttttttccatttaaacctgagttgacacagcacacgtttcagagagcacggggttgggggtaaggttatagattaacagcatcccaaggcacaagaatttttcttagtacagaacaaaatggtatctcctatgtcaacttctttctacacagacacagtaacaatctgatctctctttcttttccccacatttcccccttttcttttcgacaaaaccgccatcgtcatcatggcccgttctcaatggtcgctgtctctttggagctgttgggtacacttcccagacgggacggggcggcctggcagaggcactcctcacttcccagatggggcagccgggcagaggcgctcctcacttcccagatggggcggccgggcagaggcacacttcacctaccagacggggtggcagctgggcagaggcgctcctcacttcccagacggggcggccgggcagaggtgcacctcacttcccagaaggggtggttgccgggcagaggcgctcctcacatcccagatgatgggcggccgggcagaggcgctcctcacctcccagatgggacggctgggcagaggcgctccccacctcccagacaaagggcagccgggcagaggcgctcctcacttaccaggcggggcggccgggcagaggcactcctcacctcccagacggggcggccgggcagagacgcccctcacctcccagaaggggcggccgggcagaggcacccacttcccagacagggcagccgggcagaggcgctcctcacttcccaggcggggcggccaaaattttatccttttaaaattaatttttctaccacatgattgaattttttatttgaaactccagtgaattttgtactgttacaaagacatgaaaatctttgataatggtcttaattaaataggaagatctattaatgttctaacatgttttgtttgaaattaaaataaatacagctggtataatcactgttctgccttccacacactggaaataggcatagatttagaaagcagtgcagtagcaaatgaggtctaatatgatttctaatgaatttggatagtagatctggatcttagaactctctattttgctgtcactgagtccagctatgcttatcctatgtggtttgttctatgatcaattgacatttcttcttaggtttgaaataattataaggaaagtaatttcaatagctcaattatggtcattaagaagaaagcatcttagaccagcgctttatcagtacatcatatttagacgtacagaatttctatgtggctgtcctttaaatattttctatttttgttggctttatctagtaattttaaatgctttttttagggaatgaaaaaatatctgtgattttaaaaaattcaccatctactagttggaagtatcatcataacactactctttattctccaatctccacaccactatgcccatctaagagattcattttgtatcaaattgaaatgttcttgttaaaagcacatgcaatttgtattggctttaccaaagcctgtagaaaacataacatccatcagaattactggaattgtcattaaaagcaaaaataatcccagcccatactggatttgtatcctcaagatgaaagaagctaatgtatggcctcattatccattattataaagtttcagaaagtggcagagtagcctggatttctgataaatttcaactttactgtaataatatgctactaatctgagctgtcagtttagcattactgcagaacaaattcttttacagattggaaattttaaggtctggcttcttgttcattttccagttatttggagatttaaactagctaccatgttgcataattcaaaaaaataaatctgttaattgatgaacagttcagttactggctagacttccttttcaagattatgcggatcctagagatacatagttcaagacacaaatcaaaagtaatattaaatttgttttataattgtttttgtaattgtgccgtgtctgcttgcccatgttgtaacttattattaacttctttttaatgatagacgaatccttagtactgtggaaaagagcagacagaaatataaaccagcttctctcacagtggaattcgtccctttcttttatcgtaagtaacacctctaatttctcttgctatgattatcatcttactctgattactttttattcttactctgattctgatcttgattcagctttgttaatttataaaataatggttgtaagaacatgtcactggagtaagctacatgatttgtgtttggctgcaattattgtacttggttttatttaatttgctgttctcaaaaaatttttttagaatagctgaatattttaatgatggtggtatagtttattttatttatttacttttttttgagacgaagtcacacgcttgttgcccaggctggagtacagtggtgcgatcttggctcaccacaacctctacctcctgggttcaagcaattgtcctgcctcagcctcccaaaaagctggaattacaggcatgtgccaccacacccggctcatttttgtatttttagtagagaccgggtttcaccatgctgaccaggctggtcttgaactcctgacctcaggtgaaccacccacctcagcctcccaaagtgctgggattacaggcatgagccaccatgcctggccactggtggtatattttagaacttcagaatttttattgaaaataggaaacttgagagagttagcccctatatatgtgacttatatatgccatctttcaaaaatatagtataatttgcagactataaaaggaacactgtgtgttccttgagtatgtatttcccattcaaatttgtaacttaacattttgccatatttgcttcagttctttcttttccctgtgaaatgaaagaagacagaaataatcctttgattgcttgctgaagatgactgcagtgctgactctgcttgaccaccagtagtgatactggctttagctaggtaatgaagctccatagtagaccatctctggaaactggcctcacttagaggatataggacaggaaacccagcctgccagtagaacagtataaggtgtttctattcatcaggagtcctcacagccatccaagggctattctttggtcctccaagtgaggttataaaatcaaattggtgtgtcagggagccacttggcttagaagtaaagtatcccataaaagcctttgtctcttgtatatttaggttgtgcgcatattttgttaatttatcccaaagtattgtatattgtatgcttgtaaatgatgtatcttattcatttttggagagagatgcggtctcattctgttgctcaggctggagtgcagtagtgcaatcatagctcactatataacctgcaacttgtgagctcaggtggtcctctcacctcaacctcccaaatacctaggactacaggtatgtgccaccatgcctggctaatataaaaaaattttttatggagacaaagtctcactatgttgcctaggctggtctcagactcctggcctcaagtgatcctcccacctcagcctctccaggtattgagattacaggtgagagccaccatgcccagcctgatttgttttaaattgtatttttcatttttaaaactagtatatagaaatgtaatttgtttttgtatattgatttttatatccttgttcccccatgtagaagggaaaaaattcagtctttcactattaaatatgatattagctgtgtttttaaaaatagatgccctttattaagtagaggaagtcttattttaaccctagtttgctaatagtttttattactgaatggacattgacttttttttttaatgtacttttactgcatctatttgaggtgcttgttaattggcaaaatacatagattgattttcaaatattaaactaacatcatatttctggcccaaactacctttggttgtgattatataattaacttgtatttctctctctctctctctctcttttttttttttttttttttgagaaacagggtattgctctgttgtccagtctggagtgctatggtataatcatagcttactgtagccttaaactcctgggctcaagtgattttcttgcctcagcctcctgagtagctgggactacatgaatgcaccatcataagcagtgtgttagttcgttcccacactgccataaagtaatacctgagactggggtaattgataaagaaaagaggtttaattggctcgtggttccacaggcaatacaggaagcatgacagcctctgcttctggggaagcctcaggagcttttacttactgcagaaggcaaagcaggagcaggaccaagagtgagaaagctgggaggtgctataaacttttaaatgaccagatctcatgagaactctgtcatgagaacagcaccaaagggatgctgctaaattatgcatgaaggatccgcccctatgatccagtcatttcccaccaggccccacctccaacactggggattacagttgaacacgagatttcagtgggggcatagatccaaaccatatcagctggctaatttaacaaaatgtttttgtagataaggtcttgctgtgttgcctccaggctggtcttgaactcctggcctctagtgaccctccttcctcagtcttccaaagtgctaggattatagtatattatcctttttatgtaatactgcatttgattgattttttgtttaaaaattttgtgtctctgttcaaggatggtaagggtttctaggattttttgccttatatgtcttgtatggtttttgtcttagtctgcttggattgtcataacaaaatactgtagactgggtggcttaaataacagaaatttgtttctcacagttctggagtctggaaagtccagcagggtttattttctgttgagatctgtctttgtggcttgcagatagtcaccttcttgctgtgtcctcacatgttggaaaaagactgttgtctcttcctcttcttacaagggcactagttctctttgatcaaggctctagttttatgacctcatttaactttaatcacttctttaaaggccctgtctgcaatacagtcatatggggagatgttagggcttccacatattaattttgggggtatacagttcactctataccactctgtccttgcccccccattcatgtacttaacacatacagaatacatccattttatcccaacagccccaaatgtcttaactcattttcacatcaactctgtaagtctaaagttcaaaatcttatctaaatatctaaatctgatactggtgagactgaagttacaattcatcctgactcaaaatccctttccaactataaacctgtgaaaacaaataagttatatgtaaccagaatacaatgttggaacaggtataggatacacattcccattccaaaagggagacagtggaaggaataaaggggtgacaggtctcaggtaagcctaaaacctagtaaggtaaattctattagtcattaaagcttgagaatagccctctttggttgatactctgtacttcatgcgcactgggttgccagtgtcaccccccaccccaggtctctgcaagggccccacacataatgctgtctgtgagggcagctccaccattgaggcactaggtaggtcatcctggcccactgaaacttgacctgtggtcctaccctttgaaaccaaggaagaggaaacagccttgcctcctggatctttggtgggaatggcagctctcataatctctgaattgctttcagagtttttcttatcacacattcaaactgaatagctttatggtctgatctatagaatccaagaagtccaacagtctaccttcattccttcccactttctctgtcccctttagttcaaaatggtagtgtcttttctggtataatcccgtatccattcctggcctcactgagctggctgattaagtccactagttatacccatggtctgtttatcagtcacaccctcagtattttctttagaacaagctttcttgtttgtttgtttttttttttttaaatttggatagactgagaattttctaaatcttcagcttctggttcttttgtgcttaacagtttcttctttagtttatttctgtctgctcacattttaactataagcagtcagaaggagaaattaagctgctccttcaacacttgcttagaaattgccttagctaaatatccaatttcattgcttgctgcatgttctaccttccacaaaacactagaacacagttgagccaagttctttgccactttataataaggatcccctttccactagttttcaataacatgctccttatttatgtttgagagctcaccagaattgccctgaaggtccctatttccagcatgcacctcaaaactcttccagcctctacccattacccagttctaaagctgcttctgtattcttaggtctttgttgtagtagcactctatttctttgtaacaaaatctgtcttagtctgcttgggctggtataacaaaatactattgatttggtggctcaaacaacaatactggtcatattaaatgagttaggcagggttctcttttcctctgttttctgtgagagttggtttgagaatgctattatgattttcttaacattcaccagcagatctggacctggagattaccttgtggaaaggttttgttttgtttttcattgagacagaatcttgctatattgctcaggctcatcttgaattcctgggttcaagtgatcttaccacctcagcctcctgagtagctgggactataggcatgtgtgttatgcccagtgtgaaaaggttttaaattatggaataaatttatttactaggtaaagggctactcagattttctatttcttcttgtgttagtttttataattcatgtctttcaaggaatttgtgtttttcatcacatgaattgtgttgaatttattggcataaagttgttcatagtatttcttcatgtatccttcttaaatctgtggaatctaaattgatgtctcctctttcattcctgacattgataatttacatttttctctcttcttttttcttgattggtctagctagaggtttttaaattatattgatcctggcacatgcctgtagtcccagctacttaggaggctgaggcaggaggatcaccttagcccaggggttcggggctatagtacactatgattgtgcctatgaatagccactgcattccagcctgggcaacatagtgagaccctgtctcttaaaaaattatattgatctttgcagtgaactagcttttgatttcattgattttcctctattgtttattcgtttcctttttcattattttttctattatctttaatattaacttcctcttaattgctcttctttttctagcttcttagagtgaaaggtcagtctttgattagatctttatttcgaccttcttttctagaatgaacatgaatcattgctttagttgtgccccacagattttgatatgtttgttttaattttgttaaattaaaatgaagttttcttgtttggtttaaaatattttcaaattggggaaatgttggtcaaagcatacaaaatttcggttaggaagaataaattcaagagagctactacataacattgtgactgtagttagtaacaatgcattgcatacttgaaaatggctaagagagtagctaaaagagaggtcatcacaaaaaaagttaagtatgtgaggtaatgtgtatatgttaattagtttgatttagccacagtgtatacatatttcaaaataccatgttgttcaccataaatatatgcaatttgtatttgtcaattaaaaaagattacattaataaaatgaaaaggcatgtattgtttaatctgcaaatgttgggggagtttacagatccttttttctttcttctttttttttttttttttttttttttgacatggggtcttactctgttacccaggctggagtggtgcagtggcacgatcttggctcactgcagcctccgcctcccgggttcaagcgattctaatgtctcagcctctcgagtagctgggattacaggtgcccgccatcatacccagctaatttttgtatttttagtaaatatggggtttcgccacgttgaccaggctggtctcgaactcctggccgcaagtgagccacccgcctcagcctcccaaagtgctaggattacaggcatgagcctccacccccagccctttttttctttatggtgaaaaaagtgtctatttggaattaacctgctggactcagtttagatgatcccagttttgtaggcaatattgaaagcatcatagtcaggaggcagtctaacatatgccttctctccagcaggcctgattggggtgtagacctggccacatcattgtcaatagagcttcttcatggcctgtctgatctgttgttgggcttgatatctacagtgaacacaagtgttttgctgtcatctttttcattggctgacttagtggcttaaagggattttgatgctggcatagtagtcaagtttgtatcttctctgagtgttcctctgaggatgtttgggctgcgtttggaaccatagtgtcttgggccaccagaaggtggtgatgtgcagattgtgtgtgtgtggggtggggtggatgccttttagccctgcctgcttggccttcatagccttggctttggctttggctttgggaggggcagggaccaccttccttttaatgccatcttcatgaaaaggatctccagataatctttttttcattactttctaatatatttcctttatggcaagagaaaatactctttatgacttcaataaacttaaactcattgagttgtattttcttatttaaatttattgagttccacttttcatcatgaataacattccttgccttgattatatttcttgcctactttgtcagatactaatatagccacccagcaatcttatgatgagagtttgcatggtatatgtttttatgtcctttttatgtattatctttctgtgtgtccactgtggctgagtggaactctgtcatcttctagctctgtgtaaaatcagagaattactcagcttacagtttctttgtagttttttgccgatcttgtgggctatcacactattgtgtgaggatagatactgagacccaaaatgagccctgtgcatatttctggagcacttcctctgtatagcttcctccactccagtactctgctttacaaattccagttgcctgggcctctctgaactttgatttctgtctcctcaactcagcaaatggctgtgttcttttagggttcctcctttccatgtagcagttcagaaagtgtctccaaacaggaatctgtggtgtgatccttgtgcttactttgttttccttcttgtgtgtatcacagttctgtgacccagtttctggaactgattttctccagttttctagttgtttatagctgaaagccatgcgtagtaccagttattctgatataggtggaacttcttaattttttaattataagtttctatccaggttacctcaaagctgtttctttttggtaacatttgttattggaaataattttattgttacagtcttgtcccagtgtgtaatgacatgtgcaaaagggtattcataacagcatcaaaagaaaggggaaaagcatagcagtttatcagtagagaactggataagtgaagttaacacattgtagtggtgtatgccctctagtcattacaaaaaatgaattaggcaggtgtatctgttaagatgtagtaatgtccaggcttgacgcagtggctcacccttgtactcccagcacttcgggaggctgaggtgggcagatcacctgagcccaggagtttgagaccagcctggacaacattgcaaaaccctgtctctgcaaaaaaatacaaaaaattagatggtcatggtagcgtgtgcctgtagtcccagctacctgggaggccgaggtgggagaatcacgtgagcccaggcagccaaggctgcagtgagctgtgattgccctccagcctaggcaataaagtaagaccctgtctcaaaaacaaacaaacaaacaaaaaaaaaagtagaaagatgtagtaatgtccagaatgtattaagttaaaaagcaaaaaaagtatgatgcaggagtacatatatgtactatgtacttttttttttttttttttttgagatgaagtgttgctctgttgcccaggctggaatgcagtggcacgatctcagctcactgcaacctctgcctcctgggttcaagagattctcctgcctcagcctcccgagtagctgggattacaggtgcccgccaccacacctggctaatttttgcatttttagtagagacaggatttcaccatgttggccaggctggtctcgaactcctgacctcaggtgatccgcctgcctcggcctcccaaagtgctgggattacaggcatgagccactgcgcccagcctagatgtctctttactaagactattacacctctcattagtaaaaattgaccatcactaatcaactagaaaatgaaagagttggacaaaaacatttcctgggtccactccaggactaatattctaaaattctggtaccaatagtaacctttcttttaaaattataaattattttattttattttttagaggctatacatgcatatgacaaagaaaaagcagcataaagacctgacaaggggccgggtgtggtggctcatgcctgtaatctcagcactttgggaggctgaggcgggtgggtcacctgaggtctctactaaaaatacaaaaattagctgggcgtggtggcaggtgcctgtaatcccagctactccggaggctgaggcaggagaatcgcttgaatctgggaggtggagattgcagtgtgctgagatcacaccactgcactccagcctgggcgatatagcgagactccatctcaaaggaaaaaaaaaagagagagacatctaattttatgccaggtttgggttagtttctagccctgtcagttagtaaccatgtgacttcaggcaagatattaacttctgaccttcctttttctcatttataaatgggggccaaatatcatccttatatggagaattatgagaactaagtgagatgacgtaaatacctaaaatgctatctggtagatggcttctcttttcttttcctaagacaaaatgcatatcaaccttggcttttaacacagatcagccttttcacaaatagttcttcgtgtttgcatcagacattccttagagataaatcatactgtgaaagacaaatcttatttatttatttatttatttattatttacagaatgttttcaggaaagtgaacatctcaaggaaagtcttaaatgttgcttattgcatctctttggagccattgtagccggtgggcaggtaaggaaagtgttgaaatttaataaataaaattataattaacagtgcaaaaagctttccatagatttagtatgttctttgtctttttataatttcattcaccatacaaatattgaacttatatattgtaactaatctacttcttttattttccaaaaaacctaagtaatatttagcactgacaataaaattactgaataaataaacaaatttaacaatttttggtattgtaagttcttatttatgttagctttcaagcactagtttttatttcagatgatagaggaagtcaacctcatcagtccacttgatgaaatcgaagtctagtagtttggtttctaaagacatgaatttattcactcttctgtgtacttataatactaaatgtatttttgtaagtgtatatgtttttttttcaacaaatccaactagtgttttaaaatttacaaaaaagaatttctagtatttttttaaggtaagcatctaagtgctgtcataaacttttctgtttttgttttttgaaatggggtcttgctgtgtttcccaggctggagtgcagaagtgcgactattggctcactgcaacctctgcctcccaggttcaagcaatcctcccacttcagcctcccaagtagctgggactacaggcacacaccaccatgcccagttaatttttgtatttttagcaaacatgaggttttgccatattgcccaggcgggtcaaactgctgggctcaagcgatcttgcccacctcagcctccccaagtactggaattacgggcgtgagtcccccatgccctaccactgtcataaactttgaatataaattctagttgacgaaaggattatagttcagaaagtacatgtataaacatgtgttttcttaaaccacacagtttagatcagaggttcctaacacttgtactttttatagcacacgtccccttggcaatctgataaagccctttgtcagaatgttttaaatgcctgaaataaaggaaaccaattatactgaaatgcagttactaaaatattaataaaacaaatctgtgacatagtaatatgtgcttctttataatacattaaactaaaaaagctataacagcaagtctagaaactaatgtaacttccaagaagaaattagcataaatgatattttgagtgactgtaacagctgtaataaatgaaaatgcatatgatttttactgatgacaaaatcacaagtttgttttgttttgttttgtttgttgttgttgttttgagacagggttttgttctgctgcccagagtggagtgcagtggctctatcatggctcactgcagccttggcctcctggctcagtcagttctcccacttcagcctcctaaggagctgggactacaggtgcacaccaccacactcagctaatttttgtatttttgtatttttgtaaagacactcttttgccatgttgcccaggttgagcaattcgtggctcaagcaacctgcccacttcagactcccaaagtgctaggattacaggtgtgagtcactgtgcctagccaacaaaatcacaagtattatttatactactgttgttttgttgcttacatttaaacttgaaggaaatactaaattttagttagaaattagtagaaattaagatatctggttttttccatccaagtttataaatctctataattccctccctctgtttctttctctatcttaggtcgaaagtttttatcttctcttttttaactatcagttttttctttcacattaaacattctcttactagcatcagtgtactatgttcttaatattgttgtaccaaattacatatttaaattataatttaaaaaacttagaaacctgtatttttaaaaacttaagtaaattttatttaaagatacaaaattatgccaataatacactaggcatattaccttattatttttggcatttaggaggaaatccttgtctacattcaggacagcatcatgaagtttaatgcttagatatttatttgagttcaagagcctttttataaggctttttaacttatagctctagggaacttttaatcttctagcagtaagcaactgctacttgtttgataatgtatttatcatttcttagtctgtttggagatttgagagagtgtaatcttcatttctcaagtgaacttcataaacagttgactttatgtatttgggagatttctttttatttaatatgtccaattgagatatattttattgagtattaattttgtaaacaccattctgagtttaagagtttcctggccgggcatggtggctcacccctgtaatcacagcactttgggaggctgaggtgggtggatcatgaggtcaggaaattgagaccatcctggctaacatggtgaaaccctgtctgtactaaaaatacaaaaaaaaattagccgggcatggtggtgggcgcctgtaatccctgctactctggaggctgaggcaggagaatggcgtgaacccgggaggcggagcttgcagtgagccgagatcgcaccactgcactccagcctgggcaacagagcgagacttcatctcaaaaaaaaagtttcttatctgtttgtattaatgcaattcccctttcctccttgtttttgctctgttttgttttctctctgtatgttttttttcattgcatggcccttatgctcaatggcctttttaaaaaatatatttttattcctttttactcttgtaccttgttagcctccagagcactagtgaaatttccatttcttttgttttatttgtcctgtcctttttttggcacctagccagagtccctagttaggtttccaggtggtctgtgtgaccttctcctcttcaccctagtagaagaaaagagtctccttgtagtgagagggatggtgaccagaatcttatttttcagtgtaagtttgcttaatcacgttccagtattagctgatttccttcttttggatcattatttccccatttctatcatttctctactacagtgaaaaaatgattaagtatacaggaataaaaatggaagtggcattgttatgactaatgtagaagctgattggatcctcttctcttttcgaaaacacagagacttgttcttgttagtgcctaggggtagtcaaaccccaggagacctccataatgaaacctaacactaaaatcaagtagctactggaagtccaatttattattttatgtaccaaaaatccttgtgatccaggcatagctatagtgggatttatatcaaagttggaaagttgtttgttgaatatggcattagtacaagggtgtttagaggaattgaatatataaaagctaaagaatggtcatgtcataaaggtcagaaaaatcaaagtctaattactggtttcctttcccaaagcatcatatctgggcttcccattggcatatttgaaacctgtcctgttttgtgttatgttaaaaacaaagattttgtagccagactgacctaggtttgagtgttcatctctaactagttatgtgactttggatatactatttacatatgttttagtttattaatttatgatacggaaatagtaacatttatgggatatttgtaaggactaaatgacataatatatgtacagcacttaacaaagtacttgtacttttaaaaactaagtaaataaaagttttatcagttagatctatgatttgctttatgtagcagttaataaaattaaaacagcttaagttacttttctaattaaaaacaaagtaataaataattcagagttaatctggtgcctctgggatcttcagggattcagttttcttttgaatgtcaatctgtcatgcttactattctatttcatgctgcaagatagcttctagagttctggccattatgttcacatttggggctctaagatagagggggtaaggaagaaggatacaaatggcatgtgtcaagtatcttttaaagacatactgaggccgggcatggtggcttacgcctataagcccagaactttgggagactgaggtggcaggatctctgagccccagagttcaaaacgagcctgggcaacacagggagaccctgtctctacaaaaaagtttttttaaattagtcaggtatgatggtgcacacctgtggtcccagctactcaggaggccaaagcctgaatagttgaggctgcagtgaaccatgatcatgtcactgcatttcaacatgggtgacagaggaagaccttgtctgaaaaaataaaaaacaaaataaagaggtcctgaaaagctgacactccctgtcttttgatctcatttgccaaacttggtcatatgactatagagaaggaaaatatgtccacataaaaaatgtgataaaacttgcttccttggcctccttagcagcaggggcggctaggaaatgtgaatttattctgggtggccatgtgttcaggaaaacatcagtttctctgaataaggaaggtgaaggaaattgaatattgggtgggccattagcagtttcttccatagcagtaattattgttgttgatattatgtattatattgataattattgatgaaaacagtcctaatggcttaagtgctaattcagataattttgcatgactatgttctgtttcattatgttgtaatttgacaatttagggcaatacatattgtttatttctgtgttcttctggtcaccttgacatataactaccaattacttagtatatggaatttcagaaatatgtttgtagaatcaaaaccaaaccagtcatcttacatgtttaaatcagttgtgatggattttctgtaaccaacctgaaaaccttagagagacttaatcgatttgaggttgttttttatgtttcattttgcctaagaaatccagggttaggcagttttgagctggtacagcaactcaataagaacatcaaggactgaggtccttcaatattcctattctttctgtagcctgctactttaatcatggacttatctcttcatgatataaaggtggctgcaagcattatgtttacattctaggcaggaaaaggtgaaaggcccaagagcaaagggtccttccctttttgtttataaaatgataccctcttcatagtctactaccatatatccttgaccagaactatgtcacatggctacccttagccacaagagagagtgtaaagtgagttttctgagaggaagggaagatttaatatgtatgaaccactagcagtggctatcagagtatctgttacaaatttttatgtctttattaaaagaaaaggttgcctgcagatgtattaaattctcattattgcaaacatacacaacttcattaggtttaggtttcatttttattgtctctaatgtttcagaggaatgctttgcaagcaatttctccagccactatggaagttcttatgcgagtattggcagattgtgattcctgggaggatggagatcctgaagaagtgggtaggaaggcagaactaactctgaagtgccttacagaagtggtacatatccttctcagtagcaactctgatcagcgtcaagtggaaaccagtactattctggagaactattttaaattgctaaattcagatcattcagctttacctaatcaaaggaggtccagacagtgggaaaaccgatttattgctctacagatcaaaatgctgagtaagtattacataatgacaactttttctgagtctgttttttattttcatatctaccactttcttttgaaatacaaggccattgtatggaaagtattgattgtttaattcagatatcatatgactgcttagactttgacttcaaaataatttatatagaattgatgtgtttgttacaacctctttgctttaacaataacaaagtcaagtctctatattgttttgaaagtgtaatctcctaaaagcatcaatgtgaaaaagaaagttagctaagactttgaaattctaggaaaagtaaattttcagaaagcaccatttgtagtaacctatggtaaagagtcacatacagtgaattttgtatgtgcctctataacatctctgtagaggtcgcttcaaaaatctgccctttctctagagggcctccgtttttgtttctttttttcctcagagcctgtgtgtgtgtgtgtgtgtgtgtgtgtgtgtgtgtgtgtgtgtgtttctcttcccttctctttgtgttggttgttttgtgtcattctgcttatttatctctgtctctatgctctgcaagctccttcaccaatatattatgatttcttattgtgttcccatgtaaggttgttaaatacaaatattattaactgatagttccttttagaagtaaaacgttttcattagagctaaactaggaaattcagataagtaaaaagaaaagttatttatatcctgccactcactcataacgaacattaattgtttggtgtatagcttctaaaggcataaaaatgcttttatgtgcttttgtgtgttagtgtcattttaaaaatactgaacatcaaagttgttttaaaaattaaaaagaaaaatgattagagtaaatgtttgtatgatcccaaattttcatttttacatggatgattttctttttattttcctagataccatcacagccatgttagattgtacagatagacctgttcttcaggccatttttcttaacagcaattgctttgaacatctcatacgactgctacagaactgcaaggtatttttctattattgttgttgtctttgattttaagaagctattttttgtttttgttttgattcacatttgaacatatttttactaatttttatacttaatctctgtttgcatttaattacataaccaagttttatcttgaattgaaactagtattaaatcacttgtaattgtctaaatactttaaaggtagtcaaactggaatttctttgtatgggaagaatttcagttcatgacatatattattttcattctatccagaaatatccttgaggccctttaagtaattagttgcttctgagctcttctaactatttgtgtctgaatatactaagatgagtctttgaaaaacaattgtttctcatggaaacactgtcttctaccacagtttgtagactccaagttacataccctgtaaatacaggccactgattatagggagtgttatataaaacatgtggattgcttggtgcaaacctattactctaactcaaattgtatgtcattcactgaataatgtttttgtataagaaatagctttttttttgagatggagtctcgccctgttgccaggctggagtgcagtggtgcaatctgcagcctccacctcctgggttcaagcaattctcctgcctcagcctcccgagtagctgtgactacaggcgggcgccaccatgcccagctaattttttgtatttgtagtagagaccgggtttcaccatgttggccaggatggtctccatctcttgaccttgtgatctgcccacctcagcctcccaaagtgctgggattacaggcgtgagccaccgtgcctggccgagacatagctttttaattaaatgatttatctaaccaatatttattgtgtaccaattgtgtatcagacacttttcttttgaggtcacaaaatatatgttgtcttcataatgactactttataaattaggcacaaagtttcagagcgagagtttcagtttagttctttttgacttcatggccattattcctaacttttacaccatgtaatgacctaaatgatgattttgggtgtttatttccattcttctctccaaatatgtgatatgtttgtataatttaaataaaattcataaatgatttggtgccctttcagggtcaaataacattttttattacaattaaagtaatacatactcattgtaaatggaaacattgatagcatattgattctcccatacaataataaatatatgaattccaaaattgttgctcatagatgaaaactggtaataattcccatacttcctaatgtaaaaatatgtatttctgttaatgaaaaagtaagatcccacatcaagctgaataatatcaataggatacttttgtaaatatatttttgatagctcaaaatcatattataacattaatacaaacaaaattttgaagcaaccagctacttgatagcttttccattatcagtgttaactttttctgcagttgttcagaggctgtggaagttaatgcagatttgtagaaaccttaatatgtttgtaagtgaattttgcacaatgtacgattatattttgttgcaaaacaattttgatgccaaaatacgaaatatggagaacagacttcttgaaacattaaaaaaaaatttgtttctgaaatgtcaacacactcatcttcttttctaccttgatcttttttactgtgtatcactgtggccactcttcagtctttctggaatattaccctttctaaaaatactggcattccctgtttggttctaggctcttttttccaacctttcttaatttgcttatcctttggatgtctcacctttggatgtgtggctttagatatcatctataatacccaaatttcttgttgttagttcagctctcttgaggaattccacttgaatgtctctcaaaattttcaaatttgccacatctaaaatggaacagttcatcccctactctttagtctcccctttcttatcttatccctacagctgcttaaatcacccaggctggagtgaggtggtatgatctcagctcactgcaacctctgcctcctgggttcaagcgattctcctgcctcagccccccaaatagctgggattacaggtgcctgccaccatgcctggctaatctttgtatttttagtagagacagggtttcaccatgttggccaggttggtcttgaactcctgacctcaggtgattggcctgccttagcccccagaaatgctgggattacaggcgtgagccaccgtgcccggcctgcttttcttgtatttctaatttaagtcaaaggcaccattatcgacccagtttctcaaaggaggaacttggaaatcaatctcggcttttcctgatctctcatctcccacatctgcttatgtcaccaaagtggacaatttcgttttttaaacatttctcaaatacagctttttattctcactgtcattgctttatttcaggctttaatttttttgccagattatggcaacatttacttgttttctcctttttcactcttttttttttttttttttttttggagacagtcttgctctgtcgcccaggctagagtgcagtggcgcagtctctgctcactgaacctccgcctcctgggttcaagcgattttcctgcctcagcctcccaagtagctgggattataggcacccgccaccgtgcccggctaattttcatatttttagtagagatggggtttcaccaccttggccaggctggtctggaactccagacctcgtgattcacctgcctcggcctcccaaagtgctgggattataggcgtgagccaccgagcccggccccttttcacccttatccccttctacattgaagccaaaactatctctttgatacatcaatgttatcgtatcaatcctttgcttaacatgttctcccaaaccatgaaaatattctagtgatttttaaatctccataccatgacttgtgcaaggctctaagacatctgactcaaggcctgcctattaagcctttcttacaaagacccttattaaacccttcatgttttcttattcatgctttttaaatctatctccttgatgcttttatagctacttgaaataatttcttttctgctcttttaaaaagattactacgtaatattttctgatgctcctgggtctagatagatacatattagtatcttttagaagtctgtggggtgacacttaaactttttgtgtttcatactcaactgtggtctatttgaaggcaagcaggctgactttaatttcttctctcccatcattaggtatttggcacacagtagaagcttaataaataaagttgaaaatcgattaaatttgcagttggttgcctagaacaacaggattatgctagggtaagggagcagaataaatatcagaagcaaaatgtatttggtttaaaaatttgcttggctgcacaactctctgccaaaaaaggggcataaaaatgcttttcctcttcccttttcatgtttactctatagctagtattttataatcgaaaactcaggcttattttaaaagtattagaacagctacaacatgtattaaatgatataaactccaatgggagactactctccttttctgtataactatgttaacaaattttaaattattatgatatatattggaatatgattaatttgaaaattaggattcattacaatttttttcactaccagtaagtctttattgattgattgtatcttcccagggaaagaaggaggggagggaaaagagtcagcatgtgtattacagaatgattaggaaatgggaaaggaagtacccagtacagcaaaatcaactatcaaataaacccctcagtgatggggtcaccaaagcccaaaggagctcagtctcctgcagttcaggaatgaggggaagggatcagggaaagaacacacaggtaccctcgctctgtccccataaattcaagatttcacacaaagctttggtttctagcagtaaacatggagttatatccttctatctcctattaaacaatcttgtggccactttgacataagtttcttatacccacataaaagttccagagtgacttggatatatattcatattccctttcttgccctccagaccccactttctacatggaaggcccccatttgtttctatctgcttaagatgaaagattaagtaggtttgatccatccaaaatacagcagtgtcctaagtatttgacatgaatcacatcaagaaaaggtcttgacttgggagattgggaacaagggatggagagttcctagcttcttctggatttttgcataaatcatttaagaattgcagagataccccaagaattaaccaagtatgtgtgtgggtgtataggtttcttttggaggaggggaatgtaaaagagggcagagtaggagacaagttttcaggacaaaacatctggtccagtaggtaatagggtaaggagaacagaaaagaaagggtggttcaagatcctcactttaggccagacgcggtggctcaaacctgtaatcccagcactttgggaggccgaggcaggcagatcatctgaggtcaggagttccagaccagcctggccaacatggcaaaaccctgtctctattaaaaatacaaaaattagccaggcatagtggcatgctcctataatcccagctattcgggaggctgaggcaagagaatcacttgaacctcagagacggaggttgcagtgagccgagatcaccccactgcactccagcctgggtgacagagtaagactccatctcaaaaaaaaaaaaaaagatccccactttgttccaggtctttctgcctgtcgcagaaaagatgtcaaagatgctttggctatttttctctcaatacaaaaaagaaacttgtaaacaataaaactctaaaggaatatggagagaaaccaacacatatttgcacaaactaggccatctagcgatcaccaactcagtgaagtcttatgaagctcaaacaaatacaataactagaggcgggtagcatttaagagacacgagaacctaggatcacacacacaccacaaaattaggggtcagtttaacaaacctaagctctaaaatacaaaagaagcacattcagcttcataaatcttaaaggtcagtcttatgttacaatttgaaaccacattttaaagacagttagttctttttgcagaatcaaatattttcaccatttttctctaggacatcgtggatgttgcagtagaggaaatgcttgtgttcagatgaataaatttactaaatatctgcttttgtctcttttttgaaagtgattcttttcattttctgttttaacttaaaaagaataaaatttaattggttagaaatattttcctttgccactttgagaaaaatgttttaaagtcaaatttcagaaaaatctttctttaacaatgaacatatcttgcgtctgctattgatggacataattttaaaataggcatattgaagtttattttatgacatatggattgattttttaaatgcacatttaaattaattattacccacataactggcttgaatgtttggctgtaattattcaccttataagttctcatgtaagaaataggatgtctttaaaaaaaactttttttttatagatttaagaggtacaagtgcagttttgttacatggatatattccatgaactctaggtttttagtgtacccattgcccaaatagtgaacattatatccaatggataatttttcaacctcgagcctcctttcaccttcctaccttttggagtctccagtgtctgttattctattttgtatgttcatgtgtacccattgattagctcccacttacaactgagagcatccagtagaagtagcatttttttacttttaaggtaaagcttattttttcattatgaaaatgttacttcttataggaaaaaaggtaaatagagaaaaataaaataaattatatatgattatttctagcctgtaggcatttttaaagtctttttaaaaataattgtggggccaggcacggtggctcatgcctgtaatcccagcactttgggaggccgaggtgggcagatcacttgagttcaggagttccagactagcctggccaacatggaaaccccgtctctactaaaaatacaaaaaagttagccaggtgtcgtggcgcatgcctgtaatcccagctacctgggaggctgaggcaagagaattgcttgaaccccggaggcggaggttgcagtgagcctagatcacaccactgcactccagcctgggtgacagagcaagactctgtcttaagaaaagaaaagaaaagaaggaaaggaaggaaagggaaaaggaaagggaaagggaagggaagggagaaaggaaaggaagaaaggaaaggaattatgttaaaatatataaaacataaaaatttagcatcttaaccattttttagtgtacacttcagtggtgttaaatacatttacattattgtgcagcccatctccagagcccttcatcttgtaaaatgaaaactctatacccattaaacagctccctggtttcctctcacctcagcccctggaaaccactattctactttatgtctctatgaatttgactactctagatacctcataaaggtggaatcatatagtattttttcttcgatgactgccttatttcacttagcatagtgtcctcaagattcgtccatgtcgtagcatgtgtcagaatttccttcctttctaacactgaataatattccattgtatgtatataccacattttgcttattcatccatcagtggacatttgggttgcgtccaccgtttggctgctgctgttaatatgggtatagaaatatctcttcaagataccattttcagttcttttgtgtatatacccagaagtaggattactagatatatggtaattcactttttaatattttttgaggaacttctgtattgttttccatagtagctgtaccattttacattcataccaacagtgcacaaagttttcaatgtctacacatccctgccagcagtagtgttgttttttttcttttttgatagtggctgtcctaatgggtatgaggtagtatttcattgtgcttttgatttgcctttctctaatgattagtgatattgagcatcctttttgtgtgcttattggccatttgtatatctatctttggagaaatgtctattcaagtcctttgcccattttaaaatcagatttgttattgtcttcttgttgatttgtaaagtcttttttgttatgcattaacactagtgtgagcatttgatgcatgtaattttgtacttttgtttcatttaagatatttcattattttcatgtgccataattttaatgtctatataatattgtattaagtggatgtaccataatttacttaactacaccctgctagtaggaacttaatttatttccaaaatagaattttacttctagtagaattactaggtcatagggcgtacacttttcttgtttcttttttaaattagggaacagaacattgtgtaaaaacaagttgtaactcattggaaaatatagaaaagtagaaaaatagcagaaatatggttaaggttcttgatatacatgcaatttgcttttgaatttttttactaatttatacatgtagcagcaatgtggaagagtacataactaagctgggcatggtggctcatgcctgtaatcccagcactttgggaagctgaggcaggtggatcacgaggtcaggagttcgagaccagcctggccaatatggtgaaaccctgtctctactaaaaatacaaaaaaaaaaaaaaaattagctgggtgtggtggtgcgcacctgtagtctcagctgctcaggaggctgaggcagaacagttgcttgaacccaggagatggaggttgcagtgagctgagatcgtgccactgcactccagcctgggcaacagagtgagactctgtctcaaaaacagaaaaaagaatataggatatttccatgtatcatgatggtatcagaaattttttagagagcttcataaagcctttgtaaatgaaactacttcaaagagcttttacctttctatttgaggtattcttttcattgatttcctgctgaggaataccaggggttaattctatgagagtaattcagaataaagattttagtatcacctccttgaattttttcacactgttttgagggatatttctgaaagcatttatgtcacttcactgcagtaaagaatagcatcaaaatcaaatagtaaagaatatattggtgaagtaaattgttataaagacaaattcagtgataaagccaacatctcacatgtgtaaagaatctgctaatccgctggatgcggtagctcacacctgtaatcccagcactttgggaggctgaggcaggcggatcacaaggttaggagattgagaccaccctggctaacacagtgaaaccccgtctctactaaaaatataaaaaattagccagccgtggtggtacatgcctgtagtcccagctactggggaggctgaggcaggagaatcacttgaacccaggaggtggaggttgcagtgagccgagatcacaccactgcactccagcctgggcgacagagggagactctgtctaaaaaaaaaaaaaaaaaaaaaaaaaaaagaatctgctttatagggtcatctctaggatacaatgtaattcctactaaaatttgttagcattggtttttcttcagtatatgaaactcagatataacaaatttctgatatgaatatctttttaaaaaatacaaagctgtttgtcatagctatcatgatggtgagctaatatttgttctttataggccaaagtttattaaaatttacatccggaatcatgacctttaaaagttaattctttgataccacctatcacattttgttttgaaacaaaaatgctggagaagaaatctctttgaagagggaaaactagctgggcatggtggtggctcatgcctgtaatcccagcattctgggaggccaaggcgggttgatcacttgaggtcaggagtttgagaccagcctggccaacgtggcgaaaccccgtctctactaaaaatacaaaaattagctgggcatggtggcacacctctgtaatcctagctactagagaggctgaagaatcgtttgaacttagagggtgaaggttgcagtgagccatcacaccactgcactccagcctgggtgacagagcaggactctgtctcaaaaaaacaaaaacaataaaaaaaacagggaaaaccaagctttgggacctgggccttccctgctggccgtaatagtcttccttatttctggaattttttttttgtcagaattactttagatttatcactattcattgaagccattaagtcttcacaacaaagaggaatctttgaaataagcttctaaacttcttcattatacaaataaggaaaaatgtcctaaggcattaaatgattagcccaaggtcaacactaataattgatggaggtaggatttctaacccaggttttctgaccctaagtccattgtaatatataattttctaattgtattactggaacttaaggtcacagtttagtcagtagggaaaaatgttttctgtatattaaatataggagaatcaaaggttttattgatataaaaacattttatggacatagttgatatgattcctgaatatataaaaatctttgaaatcttatgaaaacctaactccccaaatataccgcatgatgccacagatgtccacgattactttttgtttaaattatttgtttgttagtaaagaaatgaatcctttatgttctttttatatagtagtatagaataaagacagttttgctatttagacccattggaaactttggcaaataaagtttaaaatatcataaacaatttatgaatcagatggacaaccttaagctggcggctgctgttttcatgctttctttttgtatgagattcgtcagcctatttaagtatgcgttgatttccgtaagtatttgtgtaaaggcttctcggcttggcaaatgagtttcatcaaactatagagtactttacaattccatggaatcatacatttaacttttatgatagatatgatgaaccttaagcatttatcagtttttttgttttactaaattacagggatatgatttgaattaatgtaaattttttaagctgcccaaagatacttgaattaatgaaaagaataggccaggctcagtggctcacgcctgtaatcccagcacttttggaggccaaggcaggcggatcatctgaggtcgggagttctagaccagcctgaccaacatggtgaaaccccatctctactaaaaatacaaaaaaattagccaggcgtggtggcgcatgcctgtaatcccagccactcaggaggctgaggcaggagaattgattgaacccaggaggtggaggttgcggtgagccgagactgtgccattgcactccagcctgggctacgagagtgaaactccgtctcaaaaaaagaagagaaaagcaaagaagaaaactattatctttagtagcaaggagaagaattcaaaaccattacctagtctttacagctgctaaaatcttggtgtttttgactgtttcttagggtagatttttagaaatacagttactgggttaaagaataagaattgtttgtttgtttgtttgtttttgaggcgaagttttgctcttgttgaccaggctggagtgcaatggctcgatctcggctcaccgcaacctccacctcccaggttcaagcaagtctcctgcctcagcctcccgagtagctgagattacaggcatgcaccactactccctgctaattttgtatttttagtggagacggggtttccccatgttgaggctggtctcgaactcctgacctcaggtgatccgcccgcctcagcctcccaaagtgctgggattacaggcgtgagccaccgcgcccggcccaagaattgttttaaagattcttcttacggattgctatattgctttctggaaagattttactcatttttacactgaccagttttatctgactatttgtttcccttgacctaaatatgaaatattattcctttaaaaacctttgcttgtaataataccacctttcatttgttttttgtttgttttgtttgtttgtttttttgagtcagagtctcactctgtcacctaggctggagtgtagtggctctatccctgctcactgcaacctccacctcccgggttcaggtgattctcctgcctcagcctcccaagtagctgggactacaggctagtttttgtatttttagtagagacagggtttcaccatgttggccaggctgccggtctggaactcctgacctcaggtgatccgcccacctcagcctcccaaagttctgggattacaggcatgagccaccacacccagctgacacctttcatttgttaagtctctgttatgtgccagatactatgctaataagctagcgtggattatgtcatttaatatgtatagctatttgatgaggtatttttctccctatttttgagaaaagcttggagaagtagttttccttgaaatcagacagccagtaagctgcagaaccaaaattcaaactcaggtctctgattccaaggcctgtagtgtatatatcaatttattgttatgttaagccttacatatactcttccataacatataataccatacctctatgcagtttattttatattgcatatttcagcatgtaactcgaccttttgttttctcatttctgaaataatagaacttcctaagaaccttgttccttagcatgctcttaataaattcctttataaatctgtctctccctttgagtatcatttgaatttttttcaaattgtgggcaagttgaaggccttttgggatgctgacttttatatactgaaactaaaatacttgatttctttattttactcagaagagggtaatgcccatgtatgctagagataatctcaattttcctttacagaatacaaatgaatataaatgaagctcaattcttgatgactttggagaatacttttaaactaatgttttaacaaaatgtgtggtcagataaattttggaaatgctgcaccgtgacctcccttgtcaaagtatccattagcatatttgagactctgaggaagtacttctagaaagaaccatttttaaagttagtttgatagcacttcacaaacttccttaactatagaaccatactgggtgttacgtactacggtatctttggtttgtgtcagtaacagctttccttcttttttgtgtgtattagtccattttcatgctgctcataaagacataccggagactggacaatttacaaaagtttaatgaactcacggtttcttgtggctgaggaggcctcacaatcatggtggaaggtgaatgacacgtctcacatggcgtcagacaagagaagagagattgtgcagggaaacttccctttataaaaccatcagatctaatgagacttattcacttaccatgagaactcccaccgagtttctcccacaacacatgggaatttggggagctacaattcaagatgagatttgggtggggacacagagccaaaccatatcaactgtgagacattctctgctgattctttaagaatttaggaatattaactagtcctaattattgccattgtttcttattttagtaactttgaattccaagagagaaatatctaaactactattagttcataatccaaaaagtgaataatctttaatttctaaaagtgtagtatatttcacaagggaattcttgggtttattttcaagagacatggaaacccatttaagcttcattgctgcttataggtaacaatttaatgttctttctccattattcttgtctctgtttttaacagctatttttaaatgctaacaataaggtggcagacaagaacgagaaagaccttgccaacaaattactgacagaaatgaatgaggaccaggtatctacaaagcctgcatcttgtttcagctgaagtccaaaatcagccaatgggaataactattcctgtgcttttcttcttatgtcctaaaatacacaaacattgtcaaattctaatatttattaattatttttgaaaattactaaaaagttaaaaattgctttcatctaaaggataaatatcttggtggttgatacaaacaatcagtaccattccattccctctacgtgtgtatggtcttttcaatttgaggagatataaagtacaggaatgggatctcagtacaatgctgtccacctggtggtgacttttctaagcactgtggtatattgggaccttagggctttctttgtgaatatgtatggtcattgttaatatcttgattctttgcttcttattgacaagtgatgattataattcaatggacaacctgaatcttggaggaagggaagaagatgctgaactctctgttaatttagcataaaacttgactttttgtattctagaaattcaagtctatacaggtataataaagcaaaaatatgtaatttatgttgcttctctcaatacattaggtaatttagtttgaaaaaaaactacctttaaaaattgacgttatttttctcttccaaaatatttccaataaacttacatattgtcttttattaacattgtgttaatgtccaagtttataaatagaatttttgtataacaagacacattatcatctaattattttttattctagatgtgaaatgccaatttacagaatattgttttagatttctgtataaatgttaatccctcttaaggcctacttaatgtagattaataaaacaattattatagtctcttagaggttcacattacaattccaaattgtaagtgattctatgctttcatgattgtctaagcctgatataacagtcatgttcagttttttaatattcttgatgttagtttttgtttttgctataaatacactgccctggaatttaacatatctcttctttttgatgaaacttaaacagtaatagacaaaattaggctagtttttattttttcatacaacttttaggattaaaagttgccttctcaaaaacatgacaatacttagagatacttatttcattttctgtgtctgcctcaaattttccatttaatataaaaatagatatatttaattgtttataagtataattgattggcatatgcacatgccatcttagttttaacacagggtttggaaactagataaacaagattattttagctgtctttttatacatgcaaatggaatttaaacctggatggttcaagtgtagttttgaaggggaattaaaacataataggatttctggctgggcatggtggctcacacctgtaatcccagcactttgggaggccgaggtgggtggatccacttgaggtcaggagttcaagaccagcctgaccaacatggagaaaccctgtctctactaaaaatacaaaaattagctgggcatggtgacgcatgcctgtaatctcagctactcaggaggctgaggcaggagaatcacttgaacctgggaggcggaggttgcagtgagccgagattgcaccattgcactccagcctgggcaacaagaacgaaactccatctcaaaaaaaaaaaaaaaaagtaataggatttccaatgaatgatagacctccctcccttcctcttgagattgtccattatttttaaaaagcatgtgttaagcttgtttttttctcaaaacattttaatgtaataagtgaatgttgccttatcctccttgacatgtggtttatttttcttttaaataggtaactttccttgcaggttatagtgtttcagaaatccatttcatcagaagaggaatgtaatgcatgttaagtaattattttttcaggttttcagaccaaaggtttcctaactcaataaaaatcgtgagcacatttgttaatttcttgtttccccttccccctcaataggtgtttcagggacaattggattgtttggccatatcaaccattcaggctttgaccgcagtaatgaacaaatctccagctgctaaggtgaaacatatatcctccagcttttttttttttcttaacttttattttaggttcaggggtacatgtgcaggtttgttatataggtaaattggatatcatggggatttggtgtacagattattttgccacccaggtaataagcatagtacccaataggtagtttttcaatcttcccgctcctccttcctttcatcctcaagtaggccctggtgtctattgttcctttctttgtgtccatatgaactcagtgtttggctcccacttatatgtaaaaacatgtggtatttggttttctattcctgtgttagttcgcctagaataatggcctccagctccatccacattgttgcaaaggatatgaggatatgatctcctttgtttttatggctgtgtagtattccatggtgtatatatactacattttctttatccagtctacaattggctttaggttgattccatgtgtttgctattgagaatagtgctatgatgaacatacatgttcatgtgtctttatggtagaacaatttatattcccttgggtatttatccaataatgggattgccaggttgaatggtaattctgctttgagttgtttgagaaattgccagactgctttacataatggctgagctaatttgcatcccaccagcagtgtataagtgtttccttttcttcacaaccttgccaacatctgttactttttgatgttttaataatagccattctgactggtgtgagatggtatgtcattgtggttttgatttgcatttctctaatgattagtgatgtttagcattttttaatatgcttgttggctgcatgttttcttttctttttttttttttttggaggtagggtctccctctgtcgcccaagctggagtgcagtagcacgatctcagctcactgcaacctccgcctcctggtttcaagtgatgctcctgcctcagcctcccaagcagctgggattacaggtgtgcaccaccacagcccggctaatttttgtatttttagtagagatggggtttcaccacgttggccaggctggtcttgaactcccaaccgcaggtgatccgcctgcctcgacctccaaaagtactgggattacaggcatgaaccaccacacccagccctgttttcttttgaaaagtgtccgttcttgtcctttgcgcactttttagtcgggttatttgcttttacttgttgatttgtctaagtgccttatagattctggatattagacctttgttggatgcatggtttgcaaatagtttctcccattctgtaggttgtctgtttactctgttgatagtttcctttgttgtgcagaagctctttagtttaatttggtcccatttgtcaatttttgtttttgttgcagttacttttgatggcttcatcatgaaatctttgccaggtcctattttacatttaagtctaatccatcttgagttgatttttgtgtattgtaaggaaggggtccagtttcagtcttctgcatattgctagctagttatcccagtactatttattgaaaaggagccctttcccattgcttgtttttgtcatgtttgtcaaagattggatggctgtaggtgtgcagcattatttctgggctttcttttctgttctactggtctatgtgtctgtttttgtaccagtactatgttgttgtggttactgtaatctcgtagtgtagtttgaagtcaggtaatgtgatgcctccagctttgttctttttgtctaggattgccttggctattcaggctcttttttggttccatattaattttaaaataggtttttctaattctgtgaagaatgccactggtagtttgataggaatagcactgaatctgtaaattgctttgggcagtatggtcattttttttctctttgagacagagtctcgttctctcacccaggttagagtgtagtggcgtgatcctagctcactgcaacctccatcttccaggtccaagcgattctcctgcctcagcttcccaagtagctgggattacaggtgtgcaccaatgcttggctaatttttttgtattttcagtagagacagggtttcacgatgttgaccaggctggtctggaactcctgacctcaaatgatctgcccacctcggcctcctaaagtgctgggattacaggcgtgagcccccacaccagcccaggcagtatggttattttaacagtattgattcttcctattcataaacatggaatatttttccatttgttggtgtcatctcggatttctttcagcagtgtttcgtaattcttgttgtagagatctttcacctcactggttagccatattcccagttattttattctttttgtggtaattgttaatgggattgcattcttgatttggctcttagcttggatattgttggtgtataggaatgctgctgatttttgtacattgattttgtatcctgcaactttgctcaagtagtttattagatcaaggagcttttaggcagagactatggggttttctaggcgtagaatcatattgtctgcaaacagggagagtttgacttattctcttcctacttagaagccttttatttctttctcttgcctgattgctctggctatgacttcctgtactgtgttgaatgggagtagtgagagagggtatccctgtcttattctggctttcaaggggaatgcttccagcttttccccattcagtatgatgttggctgtgggtttgtcatagatggctcttattttgaagtatgttccttcagtgcctagtttgttgagggtttttaacatgaagcgatgctgaattttattgaaagccttttctgtttctattgagataatcttgtggtttctgtttttagttctgtttatgtgatgaatcacatttattaatttgcatatgttgaaccaacattgcatcccatggataaagcctacttgatcatagtggattagctctttgatgtgctgctggattctgtttgctaatgttttgttgaagatttttgcatctatgtttatcaaggatattggcctgaagttttctttatttgttgtgtctctgccaggttttggtatcagggtgatgttggcctcatagaaggagttagaaaggagtccttcctcctcaattttttggaaaagtttcagtaggaatggtaccagctcttttttatgtatctgatagaatttggctgtgcatctttctggtcctgggctttttctgattggtaggctttttattactgattcaaatttggaactcattattggtctttactgggattcattttcttcctagtttgatcttgggaggttgtatgtttctaggaatttatccatttcttctaggttttctagcttgtgtgcatagaggtgttcatagtagtctttgtgggttttttgtatcctgtggggtcagtagtaatgtcctatttgtcatttctgattgtgtttatttagatattctctcttttttttctttgttcagttagtgatctattttattaattctttcaaagaatcaactcctggaattgttgatcttttgtatttctttttttttttggagacagagtctctgtctgccacccaggctggagtccagtggcgcgatctcagctcactgcaacctccgcctcccgggttcaagcagttctcctgccagcctcctgagtagctgggattacaggcacatgccaccatgcttggctaattttcgtatttttagtagagatgtggtttcaccatgttggccagactggtcttgaactcctgatctcaagtgatctgcctgcctcagcctcccaaagtgctgggatcacagatgtgagccattgtgcccggcctatctttcgtatggtttttgatgtctcaatttccttcagttcagcgctgttttggttagttcttgccttttgctagctttgggattggttttctcttgtttctccagttctctagttgtgatgttaggttgttggatttgcagtctttctaactttttgatgtgggcgtttagtgctataaatttccctcttaacactgctttagctatgtcccagagattcttgtatgttgtatcttctcattagtttcaaataatttctttatttctgctctaattttattatttacccaggagtcattcaggagtagacagtttaattttcatgtaagcgtgtggttttgaacaattttcttagtcttgatttctatttttattgtactatggttcgagagtgtagttggtatgattttggttttttgaaatttgctgaagattattttatgtctgattgtgttgtcgattttagaatatgtcccatgtgcagatgtgaagaatgtatattctcttgttttgtggtaaagtgtcctgtagatctctactaggtccatttggtcatgtgttaagctcaggtcctgaatatctttgttagttttctacctcaatgatctgtccaagtatactgtaggtctctaagaattacaaatctaggtgcttctgtgttgagtgtgtatatatatttaagatagttaggttttgttaaattgagccctttatcattatgtaacttctttgtctttatgatctttgttggtttaaagtctgttttgtctgaagtaagaatagcaacccctgcttttttccattttccatttgcttggttgatttttctccattcctttactttaagcctatgggtgtcactgcatgtgagatgagtctcttgaagacagcataccactgggtcttggttttttatccaacttgccactctgtgccttttaattggggaatttagcccatatacattcaaggttagtactaatctgtgcatatttgatcctactgccatattattagctagttattatacagacttgttgacttgtgtgtgtggttgctttatagtgtcatgggtttatgtacttaagtgtgttttggtagtggctggtaatggtctttcctttccatatttagcactcccttcaggatatcttgtaaggcaggtctggtagtaatgaattcttttagcatttgcttctctgaaaaggatcttattcttccttcacttatgaagcttagtttggttggatatgaaattctttggaatttcttttttttcttttttctttctttcttttttttttgagacagagtcttgctctgttgcccaggttggagtgcagtgatgtaatcctggctcactgcaacccctgcctcctgggttcaagcaattcacctgcctcagcctccggagtagctgggattacaggtgcttgccaccacgcctggctaatttttgtattttagtagaggtggggtttcaccattttggctaggctggtctggaactcctgacctcgtgatctacccccctcagcctcccaaagtctgggatcccaggtgtgagccactgcacccagcctcttttctttaagaatgctgaatatggatgggcgcagtcgctcacacctgtgatcccagcactttgggaggctgaggcaggcggatcatgagttcaggagatcgagaccatcgtggctaacacagtgaaaccccatctctactaaaaaaaaaatacaaaaattagccaggcatggtggcgggcgcctgtagtcccagctactcgggaggctgaggcaggagaatggtgtgaaacctggaggtggagcttgcaggagctgagatcgcgccactgcactccagcctgggtgacagagcgagactccatctcaaaaaaaaaaaagaaagctgaatatatgctcccagttgcttctggcttgtatgggtttctgttgaaaggtctgctgttagcctgatgtatctccaagttttaaaatatttaaatagatgtgccgattttcactatgtaaattctgaagtgatgtatgaaagtatgtaatacatgtggcttaacacctgaaataaaatcattcacaaaatatcttaatataagaatgaggttatttattgtttgcctatacttgtgataattttaaagacaaacccctataggcactgctttaagattttaaaagacattaatgattgaactgcaaactgataggatttacagtgttggcaaagaatgggacatgagcactggtgttggaaggatacttttaagtggttctgtggttcatgagtttaaaaaattaagctttatatcagagtttttcttcattaataaaataatgaccctttatttagtcagtttatgactgcctaaaatatgacatttttcacatttgaatagcctatcaatttgatactagtttttccaggttgtatggccatggaaattctgcttcttgtattcactaacccttagagttttctgtctcttctcattcactgccactgactgttcttctgtccagttatactggtagtttcctcatatgctgataagattagtgaggtcatctgtgtgaagtggtaagcatagtgccaggcacatgataagtgctaaatacatgtcagtgacttttattattactttacactcttatctgccacatctaatatactttatgcctcaccttcctggtaccagaagtgaattaattactccctgttttctgaaacatgcctttcattgtattccttagattacattggtttgtgttaggagactctaacttttgccttagaaatgttgacataactcatggttaggttcctattgaataggcttttacaacttttacagtctggcttgtgacttaatctccatctaatactagttgctgtacgatggaaaccattttaagtcctaaataactggtttatgagtataatggattgcctgtactgtattctgaaattcaaacatgagaaaagatgttccagtcttccttgaaagttgtttttttttgtccatataatagctggcatgtttaaaattcaaaagattatataacaaaaatacatgagaaaatatttcctattcttgacccacattcaaccatttctctccctaaaggaaaccagctttacttgttttgttaaattttttgattttgtagtgagtgtatatatttcaacctaaggtaatggggcactttagtatgttctaggttttccagttgtctttatatttcactttatgactttgggtgcctactggttcaaaaatacatgtgacatagaacttcctaaaatgaacttgatgttccagataattcagaccatttagatacaagtagcagagagaaaactctttgtactcagtttctttctgaccactattcaaaattggcaggaactctttaattgggtctttttaggctgatatctgactcctcttacctacagtctcctcattttttcctctatttttgttttgacttaactactactatagtaattacaaatcaagtgaagaaaatacaagaattgtcatatgccctaatctgcaaataatataataattctataacacagttattgttaatttcatttattttgaattttggtagataattataacttcattactgcagaagttatatggaatctattttaaaatgaagacatgatttaagaaggcaaatagtgaattcgtgtctttttctttatttaatattaagttaattagcataaatgagtattatttaatatttttaatattccaacatattcagtctttgaaaatgtactttgatatattgtcttcccatcccctaggaagtatttaaagaaagaattggttatacacatatgcttgaagtattaaaatccctgggtcagccaccactggaattacttaaagaacttatgaatatggtgagtttataacctttattaagagaatttctgttaatatccattttgaaaatgataactaaccttttatcttttatgttgcttttcaggctgtagagggtgaccacacttcagttgggattttgggcattagtaatgtccaacctctcttgcttcttatccagtggcttccagaactacaatcccatgacctgcaaatcttcatctctgattggctgaaaagaatttgttgtattaatagacagagtcgaactacttgtgtcaatgcaaacatggggattagaatcattgaaacccttgacttgcattcttccctccatcaaacttgtgctgagaacttgattgcaatccatggttccttggggagtcagtcagtgagctcagaagaaatccgtcgactactgagattgctgagagtggatgaatctgagtctgttcacccttatgtcactcccgtgactcgagcaatcctgacaatggcccgaaaactaagtctagagagtgccctccagtatttcaatttgtcacatagtatggcaggaatttctgtgcctcccatacagaaatggccagggtctgccttttctttcagtgcttggttttgcttagaccaggatcagttgactcttggcattgctaacaaaggagggaaaaggaaacaattgtacaggtattggtaaaaattatggaatataaatgaatactgtcataacaatatatgctgtgattcttaaacaggaaaactgtttccaagcatctagcttttagatatacagcttatctaaagtctcttcatccttaggctttatacagtttaattataagtgctttattgctttcatagtaatagctgtttatctcaaatattgctggttaagttttttttttttgtttttttgagacagagtctggctctgtcacccaggctagagtgcagtggcgtgatctcggctcactgcaagctccacctcctgggttcacgccattatcctgccttagcctcccaagtagttgggactacaggcacccgccaccacgcccagctaattttttgtattttttttttcgtagagatggggtttcaccgtgttagccaggatggtctccatctcctgacctcatgatccacccacctcggcctcccaaattgctgggattacagacttgagccaccgcacccagccacaagtttccttcttaaaagtagtgtaaaagtgaaaggaaaaaggagtaataaccttgaaaatgggccaggtgtggtggcacacttgtaatcccaccactttaggaggtagaggcaggtgcattgcctgaggccaggagttcaggaccagcctgggcaacatggcaaaaccttatctctacaaaaaatataaaaattagccaggtgtggtggcacatacctgtagtcccagctacttggaaggctgaaaggatcacttcagctcaggaagttgaagctacagtgagctgtgattgcaccactgcacttcaacctgggtgacaaagcaagattgtctcacacacacagaaaaaacactatgaaaatgaataatggccgggtgtggtggcttacgcctgtaatcctagcactttaagtggttgaggtgggcgaatcacttgaggtcaggaattcaagaccagtctggtcagtatggagaaacactgtctgtactaaaaatacagaaattagctgggcgtggtggcacatgcctgtaatcccagctacttgggaggctgaggtacaagaatcacttaaacccaggaggcagagagactgcagtgagctgagatcgcaccactgtgctccagcctgggcaatagagtagattctgcttcaaaaaaaaggaaaaacaaatgagtagtgatatgagtaatgatttctattccattgaatatgctataaatatatataaatatggtatatatttatatgaaggaacagaagacctatgtgtctgtacatccagacttaagtagctactactttttaatatgtcttgtgattttttttttcttagacagagttttgctcttgtcgcccaggctggagtgcagtggcacgatctcagccgactgcaacctccacctcccaggttcaagcgattctcctgcctcagccacctaagtagctgggactacaggcgcccgccaccacgcctggctaatttttgtatttttagtagagacggggtttcaccacgttggccaggctggtctcgaactcctgacctcaggtgatctgcccacctcggcctgctaaagtgctaggattacaggcatgagccaccgcgcctggcctatatcttgtgattttaaagacctttatttatgcttactgaatcttatttggaagaattttaaagatttgaaaattagtagttttacttttttacttttactagtggaattccactttacaaggctgccttttatttactaaactcttatgaccaaaatggattttaaaggggtctttgaaacaaggttggacttctgtgtggcaatagaatttaagccacagaattgtgggtaaagatgttcatgatggctttatggttttatgtactttaatgatgatgaaactgaacaaccaactttaaaagttctgataatacgtattttttttagtttttttacaggaagtggcatgggttttgaagcctttattacccattcaggtatgttggtcgtggcagtgtgcacaaaaagagaatatgcaacggttatgcttcctgaccacagtttctgtgattccctctgggtaaggctttagggcatcacatttaacttctagtatggttaatggtatttcccaccattgtcataaattcaacagcagtcatttttttgctaaaaaatttaaatgaggctgggcgcagtggcacacctgtacgtaatcccagcactttaggagcccaaagcaggcagataacttgagctcaagagtttgggaccatcctgggcaacatggtgaaacctgctatctactgaaaaatacaaaaattacctgggtatggtgatttgtgcctgtggtcccagccacttgggaggctgagttgggagaattgcttgagcccaggaagtcaaggctccagtaagctgagatggtgccactgtactccagcctgggcaacagagtgagatcctgtctcaaaataaataaataaataaataaataaataaataaataaatatatagaacgttaggatgtcttaaggttttctataagtaaattttcttttttctttttttttttttttttgagatagagtcttgctctgtcgccagtctggagtacagtggcacgatcttaactcactgcaacctctgcctcccgggttcaagcaattctcctgtctcagcctcccaagtagctgggactacaggcacgtgccaccacacccagctaatttttgtatttttagtagagacaggatttcaccatgttggccaggatggtcttgatctcttgaccttgtgatccgcccatctctataagtaaatttaattttgaatttcaatttaaaatgagatggggtgggtgctataactcacacctgtaaacccagcactttgagacaccaagatgggaggattgcttgaagccaggagttcaagaccagcctggggtgagactctctctacaaaaaattgaaaaattagttgggtgaggtggcacacacctataatcctagctattcaggaggatactggggagttcaaggctgtagtgagctatgattatgccactgcactcaagcctcagctatagagcatgacccaatttctaaaaaaggttttttaaaacaatgataaaataaaatgagatgatagattgttttgtgtttttttttgtttttttcttttgagacagagtctcgctctgtcaccaaggctggagtcagtggcgccatctcagcttactgcaacttctacctcccgagttcaagcaattttcctatctcagcctcctgagtagctgggattataggcgcctgccaccatgcccggctaatgtttgtattttttagtagaggtggggtttcaccatgttggccaggctggtctcgaactcctgatccgcccacctcccagagtgctgggattacaggtgtgagccactgcgcccagctgataggttgttttaaataatgcatttgtattgttttctaaaatataaaatgcttctcatttttaaaaatgattctaaggaatactaaagctttggaaatgcagaaaaggtactgttacaattgtgtatattttatagaatatgcttacgtgcttttgtactactatggaaaaaattgttactttgagaacatcaatttaacatttacgtttaatcttaacgttctactatttgtacaaattatagagcaaacttctgaaagcatttgtcattccaaagacataatgtaattttatcctttaaatgtgtgtttcactttaccagcacaacataactgttgtccacatgcctggaaaaaggccttttggtcagagcttcgtctatatctatgacaatggacaacagaaggtttctgcccctctcagatttcctgccatgaatgaagtaagtatatccaacctactctttacgggccctattggttgagaattcttgaaatgttttagttaaggtagaaggttatgtttattgtaaatatgtggccccagattttaaagtgttttctatgtagtaagactccacacattaatattcaattctgtcagcctgtcattattagatgaagtcagacaatgtgaaaaaaggaaaacatttaaggaagaaacaaaggcttagaaagaaagacttataacaggaaagccaaagaaatgaatagagcagatcaatctatcgtttaataaaagctctctaagtatgtgaattacgtaagagaatattatgatggactcttctaacttgattataattgaaacaataatgaagaagcttaaaaccttcatattttagttaggtataaaatagagtttatgtattgaagtggttctcaaagaacactagagggccttttctgaagatagtggaatagagtagattatttctcaagtccaaggattcaagtaattttttgttggttttcatctcagtgaccatttcaggatagtttgtgattaatatttatacatcataaagagaaaaaatagttttctctattttcaaaaacagtgaagttaaaaaagttcataatcatatgcactttaaaaattcaaaaattaccaaagaatataaaatagtcatagaagtaatgcatccaaatgctataggccaaggtaattttgctaataatttcctaagtatacacatgcgtctacacttcatgatttggtaaaaataaaactgcttccacttttattttcaatgtatttatttgtgtaattttatgtactattttattgtgtaattttatgttaaatatgaggatatatgttaattaaaattgtgtaatttgtttgtttgtttttagccctttacttcctgttgcattggttcagctgggcaaagaaccaccactcctccaccatcccaaatcccagatccacctttctcttctcccattacccctcatcggacatcatttggtggaattctgtcatcagcctcctggggaggaacaattgaaaaatcaaaattgattaccaaattgatatcagctggaacccaagacagtgaatgggggtgtcccacatctctggagggtcagctaggatctgttatcatcttttatgaaccactacaacctcctcaggtgaaggcattatatttagcaggtaagcatgtacagtcataatgcttaagcaaatttagagttttttttgttgtctaaatatattctgaagaatatatttagaatatagaagaatatattctgaagaatatatttcatgtgaagagtgtatttgttttaattgaagctgaaagggaagaaaaagcccctccacatacctaatagtttttgttttgtaggcataaataaagcaaaccttttttgggaaatatttcagttatcatccataatactgcctgtatttgtctgctagggctgtcatagcaaaataccacagactgggcggctttagcaacagaaatttattttctcacagttctggaagctagaagttcaagatcgaggtgacatcaggatcaggctctcacttctatataagtgaggcttctcttcctcgcttatgaggtggttaccttcttgctgtgttctcacatggtcttttctctgtgtgcatatggacggagaaagagatctcctgtgtctctcttttttttttttttttttgagatggagtctggctgtgtggcccaggctggagtgcaatggcgcgatcccggctcactgcaagctccgcctcccaggttcacgccattctcctgcttcagcctcccgagtaactgggactacaggcacccgccaccatgccgggctaattttttgtatatttagtagagacgagggtttaacggtgttagccaggatggtctcgatctcctgaccttgtgatccgcccacctcagcctcccaaagtgctgggattacaggcgtgagccaccgcgcccagcctctcctgtgtctcttattataaggggttctctcagactacggccccatcccgatgacttcatttaatcccagttaccactttaaaggccctattccaatacagtcacattggggattatggctttaaataggaagtttagggggacatagtcagtccataacactgccagtacttttgacagattttaatgaattgatgaaacaaaatataaccgtatctctagaagaaattatgtaactgcttccaaaatcatgagccttattccaaaacttgtcattttttcaactgatatattaatatatctgaagaattcatgaaggcagtagaattagggaaccttggataagtttgcaaactgtttttcattttgttttggctttttgtttttcttttggctatgattttaaacatatgtactaatagttattggatcctaactactttcaaaattatatgtatattctaacaggatgttcaggagttaagcttttaagagttatgtaactgcagaatagcttcttatttgtctaaatatcttttttagattgcatgggaattttgagatgaatgggattgcccacatttcagactttatattagaaccttatcttttcttttctttgtttttttttgtttgtttgtttttttgagacagagccttgctctgttgcccaggctggagtgcagtggctgatattggctcactataacctctgtctcctgggttcaagtgtttcttgtgcttcagcctcccaagtagctaggattacaggtgtgtgccaccacacccagctaattattttatttttagtagagacaaggtttcgccatgttcgctaggctggtcttgaactcctggcctcaagtgatcctcccaccttggcctcccaaagtgcttggattacaggcgtgagccactgtgctaggcctaaatgatcatttttaatggttgcatatttccttggattcaagacgtgttatttacttaggttgtttataatttctttctttttttttttttttggacagagttttgctcttgttgcccaggctggagtgcaatggcacgacctcagctcactgcagcctctgcctcctgggttcaagcgattctccaccttccgagtagctgggattacaggcacctgccaccacgcccagctaattttttagtatttttagtagacgtggggtttttaccatgttggccaggctggtctcaaactcctgacctcaggtgatcctcccgcctcagcctctctaagtgctgaaattacaggtgtgagccaccatgcgtgaccagataataatttttgtttgtttttgtttttgagacaatatctcactctgttgctgaggacagagtgcagtggcgcaatctcagatcactgcaacttctgcctcccaggcttgagtgatctctcacctcctgagtagctgagactacaggcacatgccaccacctctggctaattttgatatttttttgtagaaatggtgtctcaccatgttgcccaggctggtctcaaactcctgagctcaagtgatccacctgcttcagcctcccaaagtgctgggattacaggcatgagctgtgggattacaggctgtacctggctgataatagtttgttaatactatataaaaaaaattttctgtaatggaaattgatttatttcccaatttttgtaggttttagataaactggaatatggaaacaaagtaaattttagcttaatgagtttcagctgtgttgtttgagtagcttgaaacagcttaattttaaattttattctgataacacagaaccaaggagaccatatatattcaatggtgtgtatgtgtgtgtaaataattttcaggtccaaattgtttaagcccttggaagtgtcaagagtctgacatggccgacctgcctggtaacatccttctttactacacagcaaaggtcagagtaaatttgtgaactgtccatctagttataactatgttgtgaactgcagttccttttctattccttttgtcatttcattgggtaattaaaaggaggggtttgaattgccatcaaaataatcatgaattttcaaaggaaggtgagaagcagtaaaaattaaggtatacctcctccacgagggtccaaatattatcattatgtcatccctgtggtactaatggcaatagttacagttggaatttgtaccgatgaattgacttcagtaagtgaaattgtttgtgtttgtattctcatagtttactggaaggaaagatgaaacagaattgttctcagttttttaaatgtgatgtagccaaaaattttaaaaaaagaaagaaagagaagaaaaaatgttcacttcaaaaggagaaaaaggccagaaggcacagtggctcacacttgtaatcccagcactttgggatgcccaggtggatcgtttgaggccaggagttccagactagcctaagcaacatagcgagacccctgtctctataaaacttatgaaaaatgccaaaaaaaaaaaaaatagccagttttagtggcatgcgcctgtagtcccagctacttgggaggcaaaggcgggaagatcccttgagcccaggagtttgaggctgcagtgacctgtgattgcaccattacgctccagcctaggcaacagagcaagaccctgtctcaaaaaaaaaaaaaaaaaaggggggggcccagcacagtggctgtggctcttgcctgtaataccagcactttaggaggctgaggtgggcggatcacctgaggtcaggagttcgagaccaacttggccaacatagtgaaacccgtctctactaaaaatacaaaaaattagccaggcttggtggcaggcacctgtagttccagctacttaggagggtgaggcatgagaattgatcgaacccgggagtcagagattgcagtcagctgagatcgtgccactgctctccagcctgggtgacagactgagactccatctcaaaaaagaaaaagaaagtaataaattattatcatgcacaagctggctaaactagaaaaagatatacaaaaatgtataatctcggccgggcacagtggctcacgctttaatcccagcactttgggagaccgaggcgggcggatcacgaggttaggagatcgagaccatcctggctaacacggtgaaaccccgtctctataaaaatacaaaaaattagccaggcgcggtggcgggcgcctgtagtcccagctactctggaggctgaggcaggagaatggcacgaactggggaggcggagcttgcattgagccgagatcgtgccactgcactccagcctgggcaacagagcgagactccattcaaaagaaagaaaaatgtataatctcacaaaaccaaaacattttctgagtccatgtaacattgagtataatggaagcaattaatatttttgctacttcttttcttcctcccagttcttttgtttctcccagttcttttgtctttttttcctcagtccttgctgacctcagttgcttttattagataagtaaaaggaaaaaggacttttttctactccaccaccccacaccgtttttttggagacaggttctcagtctgctacccaggttggagtgtagtggtgggatcatggcctactatggtcttgaactcctgagcttaagtagtcctcccaccttcagtctccggagtagctaggactacaggcatgtgccaccatgctgagcttttttttttttttgtattttttatagagacagggtcttactctgttgcccaggctagtcttgaattcctgggctcaagcaattcttccacttcagcttcgcgaagtgttgggattacaggaatgagccaccgtgtctggccttacttttaaatatttattttttgtatctgacctaataaaatttgcttattagttttattttctcccttctttttgctgtgatacatttcaaatctagagaggagtcaaaagaatggtaaagtgatatcctatatactcttcacctaaattaaccaattactaatgttttactgtacttgctgacttttgtctcaaatcatttgtgaaaacgaattgacataactatcaagacacttcatccctgtatatttctacataatcatctacctacctaagaaaatggcccataattcatctaatatatactctgtgttcaaatttttccaaaaatatttgtatagccttttagaaatgaatcctggatccaaagtttatgcattgcattggttataaggtctcttgagtcttatatttttgtttgctttgtataacttctttttcccaaagatacatgtttgtttaatacatcttatgttatttcttggcaggaattgtatcttacacctattttcattctccactatatagcatagatagctaagaaataattgcatataatccaaacagtatatttagtggcaagttctggatgtgtgacagccaactttttttttttttttgagatggagtctcgctctctcacccaggctggagtgcagtggcgcaatcttggctcactgcagcctctgcctcccaggttcaagcgattctcttgcctcagcctcccaagtagctgggattacaggcacgtaccaccacacctggctaatttttgtattttggtagatggggtttcaccatgttggccaggctggtcttgaactcttgacctcaagtgatccgcccgccttggcctcccacagtgctgggattacaggcatgagccaccgcactgggcctgactggtctttttgacattatggtcatcgtattctttttacaaagtaactttgaatttgttaacattaaagttggatttttttttttttttaccattgaaagtaaaaaattctatactaccaaaaaaatagctattgtcttgtttttccccaagaaacttaatatgactattgataaatacaataaaacagattactgaaggaatgtttctgcaaaatggtgctatgtcatgagacagggactctatagttaaataaatttgggggactgttggattctattttttttttttttaaagacagggtatcactcccattacctaggtggccgtgcagtggtgcaatcatggctcattgtagcctcatcctcctgggctcaagcaatactcccaccccattttttgattttttgtagagacaaggtctcactatgttgcctaggctggtgttgaactcctgggctcaagtgatccacccacttaggccttgcaaagtgctaagattacaggcgtgagccactgcatacggcctgttgcttttttttttttttttttttgagacggagtctcgctctgttgccaggctggagtgcagtggcgcaatcttggctcactgcaacctccgcttcctgggttcaagcgattctcctgcctcagcctcctgagtagctgggattacaggcatgcgccaccacacctggctaatttttgtatttttagtacagacgaggtttcaccatgatggtcaggctagtctcgaactcctgacctcaagtgatctgcccgccttggcctcccaaagtgctgggattacaggtgtgagccaccgtgcccggcccagttgcattctttatatccctcttggaggttagtgatacatttttaaaattctgctataaaggaaccagtttacttttgttttgtcctactgtttcaccagctatttgagcatagaacatattttgttattataacttagttgttaacaaatgctagtttgggaaaagctgctccagaggatttttaaaatagtcaacagttttttttgtactcaattgtaggaggtatttaatcattcatttgcttaaaacttattgaatgtcttcttagtccaagaattatgctatacccttacaatacaaagataaataaataaaagtctctgtctgtaagaagcttacaatctaaagcaaaataaattttttaaaaaataagttcaacataactttatgagcatttatttttctttttagctaccatttatggggtgttaacaatatgttaagcactatgctaagtatttcacgtgtattgtttcacttaatcttcacaaaagccctgagaggtatatggtattattggttatcttttctaagctttagttttctgaagctcagtaagataagtaacttgcttagactcataattccattgaatcctggagttagaacccagcctgtttaatttatatccttaactaatatacaatatttctttgttggaataatgtacggaataatgtacaaattaatagtgagggtacaaatgaggagtggtttgttgttccaggaagctagaaaatcataaagaagatggtatcatttgtgttttaaaagacaaggttgagcagggatgcatggtaaatatcacctaaaaaggcatagactgtaaaactgggttctacatgtgtttgggtataggacactgagcaagaggagatgagactagagagcaaggtcacattagagcaaacctcctatgtcagagtagataataggcaatggatagaatttttagcagaagagtaatattatcggattcgcattttagaaatggtcttaagctgcagtgtgaaagttggattggaggaatggattctagagagtgtcataccattaggagattattctgttaaaacaggtcatagatacacagtttttagttacagactaaagtagtaactagagaaagacgtgtctgtctcggagacggataacgtttaagtatttgtttgattaaagcaatttttctcaattgtttaagaggaaagcagtaactacatcatgtgcgctaaaatttgtaggtttactttcttttggaatggggattagattagattcaaggatgctgcattacctgaaaattcggattgaatatgaagttaacatgcctttacgaatggaggttagcaaataacactgtttctaaagttacagactaagctcttactctgaatgcagccagaattgtctggcaacaacatgagggaaaatagtatcttatgcctgtaattgtatttttatattatgattttttttttgttctatggtttatctctcattttaatcacacgttttatgtgtatcttgaaattgtgcctagggaagtgctaatggaaataaaacattgaatttttttaaagcaaaaaatctgttttcatgtatttgtttaaaagagaaaaatttaaaaactatgactggcgaggccgggtgcagtggctcatgcctgtaatcccagcactttgggaggccgaggtgggtggatcccttgaggtcaggagttcgagaccagcctggccaacatggtgaaaccccatctctactaaaaatacaaattaagccagatgtggtggcgcaccactgtaatctcagctacttgggaggctgaggcaggagaattgctcgaatctgggaggcagaggttgcagtgagccaagatcacaccactgcactctagcctgggtgacaagagtgagactctgtctccaaaaaaaaaaaaaaaacatcactgtggctggcgaacaagttctgcctatagctcatctgtcagatgacaagtagcagtgacctacttttctaagtgggtgctttagaatctaattcctgattctttcttttttatttttatttattttttgagacagagtctcactctgtcactgaggctggagtgcattggcaccgtgtcggctcactgcaacctccgtctcctgggttcaagcaattctcctccctcagcctcccgagtagctgggattacaggtgcccaccaccacacccggctagtttttatatttttagtagagatggggttttaccatgttggccaggctggtttcgaactcctaacctcaggtgatccacctgcctcggcctcccaaagtgctgggattacaggcatgagccaccacgcccggccctgattctttcttttaaaacagaacagcaatactaaaattcatattatgggcatcttatctttgactatcctatattcctttttgtattatggtgaaatgttctatatgtggttaaatttatgttttgttctaattggttgtttgccatatttttcttttattcttaggcctgcaaaaattcaatctgtcttgatttatctactaattgtttgcatggaagattaacaggaaacaaagtagtgaactgggacattaaggtaaattaatagtaaatgttgggcaacatcttacataatttactgatactcttattaaggattttgtttttaaagcactgccagattgatctaaataataggtctcagttaaagggttatgcaaacatacaatttgaagggtaaacaaatgcaaagttaaatgactaacatagttgaatgactttggtttgaagtatagttacctttgtaagctacagcaggtctttggataatgtcgttcattataaagtcagtgagaaaaaaattgattcctggcaggggcaactgtctgtgtggagtttgaatgtttttgccatgtctgtatgggttctcaaatcttattttcctttttcattggcctcatatttatgtcacagctggaactttgcttccatctagaggcttctacttactttccaagaccaaactgctcttatgggtatccctagcactttattatttcacttaccatggcaaatagtaactgcttggttaatgctctagtagtccaaaagaactttgaaggaagggtcactgcttttttcttttttttaatcagttcctggtacagggttatgcaacaaataagtgttgactgagtgattaaattagtaaaggttgtttagggtgagaaaggcttaattcttaaatatagtgtttccttaaatgatattttaaatagaagttataacctaagttaaataaaagaaatataaaagataattataagagggcttgccggtaaatcagggaaataaaagataattataagaagacttgctggtaaatcaggaaaaaaaaaaaaacttttctaatcagttaacaccaaccaaatacgtttattatttcagtgaaaagaaatcattaagataattttgcctatgtagaaattaatctatcaattagtgttaatttcatgttattcatgatatataaaggatttttctccttaattttggtataagaacacttgttctttttcttttcttttcttttttcttttttttttttttgaggcagagttttgctgtcgccctggctggagtgcagtggatctcggctcactacaacctctgcctcccaggttcaagcgattctcctgcctcagccttccaagtagctgggattataggcacctgccaccacacccagctgatttttgtattttttagtagagacagggtctcaccatgttggacagactggtctcggactcctgacctcagttgatccgcccaccttggcctctcaaagtgctgggattacaggcgtgagccaccatgcccggccagaacacttttttttatctgttaccatagtaggatttatgacatgaatgacacttcataagttaacttttgctttacttgtaagactggttttacaaagctgattccatgtggtattttatatatagaaatctgtttatatgtaccatacatacctgaaaatcaaagccgtttttttgtggcctgagttacagctatgtggattattaactagttagacttttggctaatgtggaaatcaaaaagcaacagattatcaagagaaaggcgtatttttatactgtagccaaatcaaagaccaaaaaagttaaatgacaactggtaaaataatatttgccttccaaaaagttaatttacttatttacacaaagagctcttcaaaactggtatgacaaacagtcaaaacaaagtagaagatatgaggccaggcacagtggttcacacctgtaatcccagtactttgggaggccatggcgggcaaattgcttgagctcaagagtttgagaccagcctgggcaacatggcaaaactttgtacaaaaaatacacacgttagctgagtgtggtggcacatgcctgtagtctcagctacttgggaggctgaggtgagaggatcacttgagcctggaaggtcgagactgcagtgagccgtgatcaggccagtgcactccagctgagtgacagagcgaaaccctgtctcaaaaacaaacaagaaaaacccaacaaagtagcagatatgtaggatgaacaagtccagagatctaatgtaaaacatgaggactatagttaataaaattacattttattagggagttttgttaaataagtagattttagctgctcttgtcacaaagtaactatgtgaaatgatagaaatgttaatctgcttcactatagtaaccattttattatctatgtgtatcctacaacattattttgtaaacctcaaatatacacaataaaatttatttctaagaaaacaagcaaagaatgtgaagaggttgtttgaagacttaagttatgtccacgtggcaattcagaacactttaataattaataataagagcaaaccttgtatggtatcgactgtatgtcagagactgcactttttatatattagcttacttaatccttgcaatactttatgaagtgggtgttactattatcctcattttacagatgaagaaactgaagccagtgatattagtaacttatcaaaagatatagaaaatattttattaagctacccaaaatatccaaaactttgaactttgcctgaaataccctctctacctttttgttaactaaaagtcgaggagtcagtcatatttctaccaccaaatgcattttttttcattgtttattctcttgtttattatgcctaattgcctagtgacagttgtttttccattgttggagttacattataaagtccacttatggggctatgtttcatttgcctatgttcgaaatccctaaaatttggaaaatgaagatggagtaaaaatggtctggcctgatctctcttgagttttgattatggtgacccttgaggctgccctgtaaagcatcttcctacacaaaaattccttcagcttaggttatcctgtacattgctcaaaggtttatctagcagattataacttcatacatgtgaagatattaaatgacaaaattgtcctccttttataagatttaaacattataattttccctttaggatatcataaactgcataggtgggttaaatgtactctttcctttattggaacaaatcagccactttagtgaaggacagattcctgaagaaaagaatgaaagcacagttcctgaatcagtaacacctgttgaaggagattggctcgtatggacttccacaaaggcctcaggtattaagatgaaattaacacaaaatagtcattgagaaatttgagaattaattgagaaataaatgaaaatgttttactgtcattaggaagaaacttaaccatttgtagctgtagcagttgtttctacttttactaatatcattcagaaagtttataatactttcatcaaaaaacgacagattaatctccagtatccttagtttatactcttagtggaaatatgaccacattgttaaatttgtggtagagaaaatatgtgcacataaatatacaatattatagttgctgctttttctgattctattgtacaatagagcgttggaagctgactgctgaaccagatttctactttgtgtaacagtgtgcattaagatatagaaaatgtgatataaaagtgattagagaaattatgataattaatatgttcctgattctacagagtcaagactagagagaaacctagttgcaacatttatcttaattgtgaaacattttattcagagacatcctatcaaccagggcaatcttattcactcccatggagttgcaactcttggtgctttacttcagaaggtgagccagtctaacattgtgttgatgtagctaataattgtgatttgcagttgatgttgggattttttcttcctaataaatatatttttaaagattattacaacttgaattatattaatggatataatttgttcacaggcagcttttaaaaacttgtatggaatcatcttatacaagaaatacttattttatgtaatagtgtataatctttgatgtatacaaccttgtttgatagctttgatatttgggatgttgagaaatataagactattttaggaatatgacactaggagaatatattctggtctaatatcagaaaaaccaatacttaagtttttatttttctaatgtgggtttttctatttttatacttagtagatgttctgattaatgatttaaaattataacttaatgacagttatttaaactgaactatatgaaaccctcttctgtttggtttcaggtgccaagcaccttgatggatgttaatgtgttgatggcagttcagttactaattgaacaagtatcattagagaaaaatatgcagctcctgcaacaaatgtatcaatatttactctttgactttcgtatttggaaccgtggagattttccctttcgaatcggtgagagcaggctttcagataaacattttatagttgttttagaaatttataactacctattgactttattttagctgaattacttaccattgaactttttattttaggtcacatacagtatctttcaaccatcattaaagacagcaggagagttttccgaaagaagtatggtgtgcagtttctcctagatacacttaggatttattatgggtatgatgcccttgttctttctcagtttgatatattattttctgtctgctacttgattggaatgtgtagactgtagactttctctttaccagcgattctagtatgttttaactggagagaggtaggatacagtggaggttaaaatgatgaacagtggatcgcatacactgagtttgaatctggctttcattaattgtgcaactgtaggcaaattactcaacttctctgtgcttgggtttcttcatttttgaaaggagataagaaaactgttacctcctttggttgttttgaggattaagttaattagttaataatgtaaaacacttaaagtatgtctgctatgcagtgggtgttgtattcacataagctattttattcactgaaactcttaactcagaagattttccttaaaaagaaaagcaagccaaagttactatgaatctcagaattacatggaaatatttttttaacactatgaattcttttatgtagaaaatatagaaatgtaaaaattaggctgggcgcggtggctcacgcctgtaatcccagcacttcgggaggctgaggtgggcagatcgtgaggtcaggagtttgagaccagcctggccaacatggtgaaaccccatctctactaaaaatacaaaaattagctgggcgtggtggcgtgtgcctgtaatcccagctactcaggaggctgaggcaggagaatcgcttgaacccagaaggcagaggttgcagtgagccaagattgtaccactgcactccagcctgggcaacagagcgagactccatctcagaaaaaaggaaatgtaaaaattaaaatttcaattcttatactttgttttgtctttcaggaatggttgtaaatataatgaactatctctagatgatattcgaacaataaggacttctttgtatggactaattaaatattttctgtgcaaaggtggatctcatgaagagatacaaagtattatggggtacatagctgctactaatgaagaagaacaggtattatgcctaagatacatctacttttcctttttaacatttgagttgctacatcatcttctgaacgtatgtttgtgtctagttaaatattttgagagtaaaatatgtgtagtgtcacattcaatattatgcacttaagaagtaaattttatcttttttttttttgagatggagtctcgctctgtcacccaggctggagtgcagtggcacgatctcgactcactgcaacctccatctcccagaaggagaagtggttctcctgcctcagccccctgagtagctgacattacaggtgtgcacccccacactgagctaattttttgcctttttttttttttttttttttttccggtaaagacagggtttcaccatgttggtcaggctggtcttgaactcctaacctcaaatggtctacccgcctagggctcccaaagtgctaggattacaggcgtgagccaccacgccaggccagaagtaaattttatctactaactaaatttttcataaaatagatgacagtgtaatttaatattccaattagctagaaaatttaatatatggaaatgtttcctttggcaattctgaagcctgttttcatagtctgcgtggtgtatgtttacttagcatcgaagttatcatcaaagttagtgggtagatttctttctttttttttttttttgagacagagtcttgttctgtcaccaggctggagtgcagtggcacaatctcggctcactgcaacctccgcctcccaggttcaagtgattctcctgcctcagcctcccgagtagctgggactacaggcacgcagcatcacacccagctaagttttgtattgttagtagagatggggtttcaccatgttggccaggatggtctccatctcttgacctcgtgatccgcccgcctcggcctcccaaagtgctgggattacaggcatcagccaccatgcccagccattagtaggtagatttctaacctaggttaataaaatattacataaagagtaaattataaatgtgtgtctagttttacttacattatcccgtttaatcctcagaactaccctttaagttagtggttctctttgtttggcccctaaccaactttacctgaaaacttgttagaaatgcagatatactactgattcaactgctgaaccaagccctccagattattctcgtgcacgtggtaaaatttgagaaccactgctataacatatacagaccaggaattactttttgcatgtacgcttttggaaatttatattcagagagattatgtgacttaaaaagtcacacaactgataaacctgaaactagaacccaaatgttaaaaaaaagcattttagagccatttttgtgctcttctggtataacctccgcaataccacaaatttaagtagatttatgttgactaggctattttgccctctatatataatatttattatttactcagtggttacatgacttcattatcggtattagatgagttaatgcaggctgtttccctataaggttgccgctcaaaagcttctcattattcccatcttatttcatgatagctgtatctatgattcattgccaacaatattttttttggttatttcagttaaagagttatttgttgaggacttactgtttacacacaataatattagacattacatgtaatataatgatgaattattattcttttaagctaatggggcaggggtcaataagagaagtttacaaataactataaacaaagaagagtatgacaatatctgtaagagagatacaaagttctatgaggttttcccaagagggttttacatgttgcaaagaccaggaaagactttatggaggagatgtcttttcatatggataaaagaggatagatatggttccaacaggtaaatttgaatagtgaaaggatatactaaaggaaattgaataagacaaaagcatatctggttcaaaagatatcagaggccaggtgcagtgagctgggtggatcgcttgagccgaggagtttgagactagcctgggcggcatgacgaaaccccattcctaccagaaatacagaaaatcagccaggcatggtggtgcacacctgcagtaccagctacctgggaggctgaggtgggagaatcactgagcctgggaagtcgaggctgcagtgagctgtgatcacgccactgcactccagcctgggtgacagagggagattctgtctcaaaagaatttttttaaaaagacatcatatcagatatagtgaagttaagataaaacattatataggatttaattaaataacttttgtggcttatgaccttatttgtgcttgtatatatgaatgtggtggtttgttttgtgttgtttaattttaaaagctctttggaattttggacgtgctcttcagtctcctacgtaccagcccaaccagaggtcagcttttcttactgctttttgaaccaggaaatgctgacatactgtacgcattgctcttaaatcagaagtactctgacagactaagagaaatcatttttaaggtacaaacatttcttaaacatctttgtattttgaggcgtttgtgggtatatgaattttcttgcaatatatccattctgtgactataaattatttttatatctatttctctaagatgttcaacttatttttatatatagttttcatgtttcagttgtttgcatattaaaaaactaattatattgtaatctgaaaatcctctcagtggaatattcactttgtcataccatcctcaatataaaacctcccatcttcttgacttggtgggtctatgtggcaattcagaacatttcaacagctaataataatagcaaactttatgtagcaaccactatatgtcaggaactaagtacttttcatatattggcttacttagtcttgcaataacttcatgaagtgggtattattactattatcattttacagatgaagaaactgagtccagagagatcagtaacttataaaataaatagaagagttgcttcacaaatgtttacttatccttgaaaattattttaattttaataactgttacttaagtggattattagattgatccagaggtgtactgacacacatttgttcttgcaaactacatggtttgtttccacctaagcctttctcattaagaaacaaaattttaaattatttctctttaatttgccatgtaattaaactagagttttaagcataccaattatacaactacagatgaatttcagtccagtttattcttttttaaaatttgtttatttttttgagacggagtctcgctctgtcgcctaggctggagtgcagtggtgtgatcttggctgactgcaacctctggctcccatgtacatgtgattctcctgcttcagcctcctgagtagctgggactacaggcacgcatcaccacacctggctaatttttgtatttttagtagagacagggtttcactatgttggccaggctggtctcgaactcctgacctcagttgatctgcctgcctcagcctcgctaagtgctgggattacaggcatgagccactgtgcccagtccagtttattcttaaatccatttttacattatactataatagggagtgcctattcttttatgcctattgttccattattggaacactaagcatttgggagttatttatatcccactgctcaaggtcatcaccaaggtctgacttttcacacatgtctgcaattcaaaaaattgcaacctccggcataaatgggttaatgctgaagtttttgtacttaaggaataaaatgatgctccaaaaacaaagtatagccatgttttattctataagttaatagcattattttattctataagttaatattgctataagttaatagcaatacttactaacattaaatattaatgctaataaatactaacattaatatttaatgttaataagttaacatttttaatgttaaatgacaaactattcttaattttctatattgagaatatattacttgtcgtgaccagattatggaacaaatgttgaaatgcacgaacgtttatgagcgtagtaaacaacatattcgactcagagaagttggctactcgggactgggactccttcttaatgaagcacttgttaatacttctcttattaaaaacctcacccatcaaatcataaatacaggtatgaataaggctaataaagctaacatatttaagaaatgttttttcctgtaagtttttttcatacctttctcaggctgcttttaaaatatctgttatttgattcagcagggccttccttggataccatatcttacgtagttttgttgtttttgtctccccggggcgtagcacagttccttactcagtaaatgtttattgactaagtgattaagttaataagtgagtccacggaacaagaaaaggacactacagaaaatatgtgcaaaagattgttttttcttaaggagcttaaatttttaaaggcaaatgaaaactaatttcagatattctttgttgtttcttttgtttgttttgttctggttttttggtttttctttttagaaacagagtcttgctgtattgaccaggttggtgtgcagtggctagtgacaggtgtgatcatagctcactgtagcctcatactggatgcaagggatcctcctacctcagccttccaagtagctggaactacaggcatgtttcaccatgccctgcttctaatttttttaaataatttttttcagtacttaatgacagacagtagaatttatgccagatgctgggagtttggggatataagattctttgtcttgattagtttacaatcttgttgataagacatgtatataaaaagataaataataatataagagccatgcagtatggacagtacgttcaagcaatcaaaaggaacaattatttagggttgactcaggaggatgtcaaacattctaaacctattttttctttaaaatttgaacatacctataattcatattttaaaatgaaataattatttcagcattttatacaagtattatccacagttctttctttggttatctctggtatttaattttaactttttgtttttcctaccatagatcctgttattaatttcaaagatctactatctgtggtatatatatctcacagagcacatataaatgttagagtggccatctgcagaaaggtcagtaaactcttaagatatattttaatgatagcagcatcaccatcatgctataaataactttgcattattttgcagcagatacaagttttcatttattttataaatgacgtaattttataagtaaacaattttctttttgaagtaaattaacttcatgttatcataagaaattagcatgtgaatgttttcttagttcttcgtggtctcctgcaaatatgttctttccagagtcaaaaatgtattaccagagaataattttcttattaagaaccttcaatgattgtgaccatttctaattaatataccatattatagagtttctgaatcttttgaaactttctggaaataattttctataatttgtttaggagtattccaacaatgatttgtctttagtacacagttaacctttaactaagtcaagagatagttatcctgtcttcccctttcagatcataactttctctgtcctccactagtaaccattgacctatttaatttgcttccttgcttttcttttttttattttacctcatgattttgtcacagttcttgatatatatatatatatatgtgtgtgtgagaataagagatctctatatatagagtttatatatatatacacatatatacacacacatatataatttatttgtttaactgacagaaaagaaaaatatatatatttgttgtataatatatatgtataatttccttttctctttaatggaaatgcatagtgtttcattgtatggctatttaataaagtattatctggttccttattgatagacatttaggttgtttcctgcttttccatgttataaactgctgttatgaatgtctttttatgttttccaatttgtggtaatacatctgtaggacatactccatgaaatagaattgctgtttcaaagggtattaacgttttacattttgatggatttttccacattgtccttcaaaataactgtaccagtttacatttatacaaacagtgtgtgtgacagtgattatttccctatgtacttagctctgagtatttggagcaggtcatataaattgatcctttccttttcacgtataattagaaacagctctcagtgcagcttggttttatctattatttatgtataaaatagatataaaataagtcatattttatggaaactttaaagtcagcatgaaaagtttctttgccaagtaaagcttaatctggaagaaaaaaattgttattctgcacctataaagtaacagttgctcactgattgatattgtattaataaagaaagaatcttcacgtcattgtgactccttgccttctgtatcaacatgtattagtactagtaatattgaagtccttaccaacattgttcatctcttgctctgaaaattgtcagagctaaaacttctgttaagagagatactcaaaaccctggaagctagagttcttttcatctacatagaagtttattgactttgtgataaaattgtcttaaaagatcttaactgaatgtctaaagctttttaagaacttgtttttatctaaaaattttaatcaattggatagtagagatcatacgtattctcatgtcactgtttactattctagctaagcagtggcatccatcttgctgaaattcattttctggaattaaagtttagtttttgttctgtttgtataatatagacttactaagcaatgtagactttagtgtagacatactgaacaaaaaagtttttgcaaaagcaaccatggctcatgcctgtaatcccagcactttgggaagccgaggcaggcagatcacaggaggtcaggagttcgagaccagcctggccaacatggtgaaaccctgtctgtactaaaaatacaaaaattagccaggagtggtgctgtgtgcctgtagtcccagctactcgggaggctgaggcaggagagttgcatgaacctaggagccggaggttgtagtgagtcaagatcgcaccactgcactggtgcgacagagcaagaccctgtctcaaaaaaaaaaaaaaaacttaactttccctgaaaaaaacgagacagaaaaacatccttggtatactcagtttctatcaaaatgtcttatgtgtcctattcactcccctaatgctagtgcctaaaactgtgcctagcacatagtaggtgtgcaataatatttcctgaacaaatgtagggggctcatggaaagtatttagttgagaggatattactctattatttaacatataccatcatcctattcattttaatttttcttttttatcttccagcagatattttagtgtactcttactctgtacaatgagtaatatggagattagttggaaacacagtgccagtcttccaaatagtttataatctaattaagaatataatcttttgaaagtatattcttctatagtttctcattaaattaccttatcattaaaataactgaaaatattatttttgatataaagtactatgtactttttgaagaattttgtattctaaatctttttacaggttttgcaaattttgcagttccagccagatgcagcacatcaaatatcacagcaagtgggttggcaagacaccttagttaggctttttttaaaagcaaaatttgaaaacggaaatactcttcataagcacagtagagctgttttaatgaaagacaatgataaaaatatgtcaactgaagataccaagaagaactctgatgaaaaaacagatgaggaaaaaatcacctcttttgcctcagctaatgtgtcttcggatcagtggagtttggaggatagacactctttagactcaaacacaccattatttccagaagatagctctgtgggagaattgtctttcaaatcagagaatcaagaggaattctggcatagtaacccttcacatttgagtttagacctcagtggaattgactcatgtgaaatgagtgatagtggaagtcaagtgccagacagtctgcctagcacaccatccccagtagagtctactaaatcgttttctgtgcactctgacagagaaagcagcatcacaaatgatatgggctttagtgatgacttctctttacttgaaagccaagaggtaaaattgcttatttttccaaatgttgtttttattttcatgtctgatatatacttctaatccttagaaatatgtgagcagttgttaacaatttcatattgtattcatgttctaagtttcatgatctaaggtttagaaacctggaagtcactagattgtgagttttttgagagcaaagctaatgtcttactcatcttatgtctctagggcctagtaaagttccaggttcattaaggactttaaaaatatgttaaatgattacaatgagtatatgtaatggttcttatgatgtgctttgaacaactacaccctctagttatttaaaattactttatattttccatagagatgtgaggaggagcttcttcaattactgacacatattttgaattatgtaatgtgtaagggactagaaaagtctgatgatgatacttggattgaacgaggacaagtgttttcagcactaagtaaaccaggaatatccagtgaactacttcgaccatcagatgaaataaaactaacgtaagcatttagttagtgattttccatcctccttttggtgacagcaggagtctaaaataacgttagttattgaacatttattcagtattctgtggatataacaagggagaaaaagagaaactttgtgctcagttccttttcctatcttttgccgtattagtaggatctaaagaggaatcccaaactcattccagtatgaggaggtttaagtcttaagtaaatttgggtcataagtgattacagattttttgtttaaactgttttcttgcagtatttgaggacttgatacattgttttctacaggcttgtccaaatttgagtgtttccgtgctaagagaacggagttgggttttcatgataattatttctctgaaggatttagggttccttgtagatcaagtttgtccaacccacaggttgcaggccacacatgcagcccaggatggctttgaatgtggcccaacacaaattcataaactttcttaaaaaattatgagatttttttgtgatttttttaagctcatcagctattgttaaaacatatcgttaaaatatcattagtgtattttatgtgtggcccaagacagtccttcttccagtgtggctcaggtaagccaaaagattggacacccctgctgtagataataggactctgtaatggtagtacaccggggaagtattacatcttttttccacagggcaagactctctgtaaggcataataaggctttcttccctaaccttgccaatttccagctttaaagaaactaatttaagtatctcatgaaggatggaatatgaattattgtcatagcttttttatagtcaagtaaaacaggaaacttttgacttttaatactatgtatattaaagataaatactccaaacatttcaacgtttctccattgttgttaaattccatttataggcctggcatggtggctcatgcctgtaatcccagcactctgggaggctaaggcaggtggatcacctgaggtcaggagttcaagaccagcctatccaacatggcaaaaccccatctctaccaaaaatacaaaaattagccgggcatggtggtgcatgcctgtaatcccagcttctcgggagactgaggcaggagaatcgcctgaacccaggaggcagaggttgcagtgagccgagatcacaccattgcactccggcctgggcgacaagagcgatctctgcactccgtctcaaaaaaaaaaaaaaattcaatttccatttacagtatcttagggatacctgctagagatagtatatctttagagatacagtgctgcctctcaagctattttgttttgtttttaatgtcctactgtttttctaagctcacaatggttttaagaggactttgttttccatttagtttgctacaaaagatgttagaatgggcaatctcagaaaacagagaagcaaaaactaatccagtaactgctgaaaacgccttccgactagtgctgatcatacaggactttcttcagtcagagggactagttaattcaaacatgtggaccgagaaggtgcagtaatatctctttaaaattatattttgggtagttaagaactttattcaaagaaaaattttgcaccccctctttttagagcgttaatgcttaatcagattcaataaacaaggataagatgtgatgaatagtcacagatttttgttagctattactaggatgattcttttggcttttgtcaactgaacattggactagcttttgaaatatttgtggtttgtattaatgttggggaaaattgatcatcagtaaattgaaaaactgaatgtttttatttctcaatttttttcctttgtgatagcttttagaggatatgatgctgctctttgactgtctgtcagtctgctattctgaaagtccagtatgggtaaaactctctcaaattcagatccagttgcttctaggattcattggaaggggtaatttgcaggtttgtccattcttttatattattttctgtgcttgcatgcagcataggtattatttatgtaacaagccagttaaaatgtctttttggtattttaagtttttcattagttctaaaagtatccatgatttcatttggagttttgaggagcttgagaggcagttaatttgttatttcttcctgatattaataactttatataattttaaggcttccttttacaggatttatacatagcttatattagaaacattgctcatatcatctgtattgaatgtaactactcaggtgctaggtagcctgtgtagactgtttatatatgtgcagtttagggcttgaattttttagaaaaattattttttaaattattccttttaaattttttctgctattttactaattcacaattttacattttatctcatattttttttttatttatcacacactacctacaaagtactaagcattgtgctaggttttagatatgaagataaatattggtcacaaggaatatttattatttctgttttaaatttaaaatggaaaaggctgaaaaagtttgatgtgaattttagtctctcacttttctagttacatatggtacttgtgagaacctgggttagattagtcatgataagattttcacagctatttacctggccctttttattttattttgatgtttccatttttttatttggtgcagggaggttggagtgtgtctggcttctgatttacataaactagatataatattaataagaacatggagaggttaaaattctgacaacaggttgcccacccccacctttttttttttttttttttttttttttttgagacagagtgtctctgtgtcttccaggctggagtgcggtggctctcggctcactgtaacctccacctcccaggttcaagcgattgttgtgcctcagcctccaaagtagctgggactacgggtgcctgccactatgcctggcaaatttttgtgtgtttttagtagagacggagtttcaccatgtttgacatgctggtctcaaactcctgacctcatgtgatctgcccacctcagccttccaaagtgctggattacaggtgtgaaccactgcccccggtcactctatttttaaaggagtatagtctgatgattctattttttatttttatttatattattgtgaatgctgcatagaagtaattctatttttaatagatatttatttttcattgtaaaagtaacacatactcattgtagaaaatacacaaaagcggctgggcgtggtggctcatgcctgtaatcccagtactttgggaggccgaggcgggcggatcacctgaggtccgaagtttgagaccagcctgaccaacatggagaaaccccgtctctactaaaaatacaaaaaagttagccgggcgtgctggcgcatgcctgtaattccagctatttggggtgctgaggtaggagaatcacttgaacccgggagacagaggttgtggtgagctgagatcacgccattgcactccagcctgggcaacaagagcaaaactctgttaaaaaaaaaaaaaaagaaaatacacaaaagcatagaggaaaaaataaataattcagcataacgtaagagaaaataactattagcattttagtacgttacttctttcttgttctatgaatatatctttttcagatgtcatgttttcggatgatttgtgttttttctttttcttactattatataaaactcatttccctgtgttactaatagggtttttttttcctttcatcctaaaagtaacacatattcaattgtagaaaacttggaaaatatggaaaagctaaacaagtatatgggcattaaagtacacagatggtggaattttgaattatacagacttttaaatgcaatttttaaatatatgaactaagaacttaaaaaaaatgattatactctttgtctagtaattctactctgaaactaattctaaagtaatatctaaaatatgaaactggccaggcgcagtatctcatgcctgtaatcccagctctttgggagggcgaggtgagtggattcacttgacgccagcagtttgagacaagcctggccatcataacgaaaccccattttgggaggatgaggcatgagaatcgcttgaacccaggagtcagaggttgcagtgagccgagatcatgccactgtagtccagcctgggcaacagagtaagactctgtctcaaaataaataaattaattaattaattaaaataaaatacagaaccacctttatacacatagatgttcattatagtattcttttttttttcaacctagaagtagaatgaggatagcctttttggctttttcattaaatttagcctaatgactgctaaagtagttgcagttagcatgctagatagttctttattttagatgttaggacttttttttctttcatttgtagtttaccctcagtgttttttaatttgatgaaatttcctaaacaaaatgtgtatttatttagttcacaattaagtattcagtgcccattccataataggggctttataagtacaagcacagcacctacagataagacagattattattattattattattattattttttttttttttttttttttttttttttttcagatggagtctagctctatcacccaggctggagtacagtggcacaacctcggctcactgcaatctctccacctcccaggctcaagcaattccctagcctcagcctcccaagtcgttggggctacaggcgtgtgccaccacacatggctaatttttgtatttttagtagaggtggggtttcaccatgttggcaaggctggtttcaaactcctgacctcatgtgatccgcccacctcatcctcccaaagttctggaattacaggtgtgagccaccacacctggcccagatgagactgattctgtctactagtggttagtgacctaaaacatttctcactagcctattgtgtaattttattctctcagaaataaaaacatatttccctgaggttgtacacattaaaggctagaacaggaacctctttctgtataggggttataatagagctgcctgcaaacttgttttatttggctcatacatgttaattaattgccagtatttaagtattaaaaattttacataaaaactaagatttcccagcttctttcaaaaataggactgcatggttgttgattcatttagttgtatatagtgtctccggttagcctgttccctactccccctgttgccttagctcagccaatgattcccatccctgggctgcacattaaatcacctagaggagcattctaaaaatacctatgtagggcatcacccatagtaattaattcagaatggggtgagactagggcatcagtatttttttttgtttttgagacagagtcttgctcttttgcccatggtggagtgcagtggcacaatctcggctcactgcaacctccgcctcctgggttcaagtgattctctggtctctgcctcccaagtagctgggattataggcatgtgccacctctcctagctaatttttgtatttttagtagagatggcatttcgccatgctggccaggctggtctcaaactcctgacctcaggtgatctgcccgcctcagcctcccaaagtgctgggattacaggtgtgtgccaccatgcccagcctgggcatcagtattttttgtaactcctcaggtgaccctaatgcaagactatttataatgagggaaaagaaagcaatatatgtatgtaatatgtcagtatccaaaattaaagcagtagtcaagtaaattatcttatattcattaaaagtaccttggtacttttaaataaatgtgtaaacttagtgtttatttaatttaatgacattaagttaaaagcaaaacattggatatttaactttttatgtaaatagtattttcttaaacacataccaaaaaaaagcccataatattacattggtatttcctggatgtagggattgtatgacttttttttctttaatttattggactcttggaattcagttcctttagtcggattcaaaaactaaaaggtgggaagagggatgggttgggggaaaatatgagcagggtagagaagtcagagctttgagtcatgttagagatcgtttcctccaatgctgtttacattgctaagatttacatggaaagagtacctgaagtctcttgttgccttatcctgcaaagacctgtgtgtacagcgcagaccagcttttggcacaaatacattcttgaagtggtttcaggttctaatactttttaattttattttgcttttatttatttgggaagtaatatagatccaagtgaggatatagggttaagggagaaggagtcacaatatgtcatttttcctgctttaattttaagacttagatctttctgtagccaaggaaaaaggaaacccctagtgatctaatttacctttcctcactggggattaaggccaaagcttagtagtagtatacagtatttctttgtctgggcttgtgccctgactatgtatattactcgggaattttaagggtagttcggtttctgatcaaggacttggactcctgtatacctgttctttatgtatcaaaatattttgatttcaaataacagaaacatcaagccaaattgacttagttaagaagatttttttgctcatatagtttagaatttcatagttaaggtgagtttaagcaggattcagtcagggctccagttccatttatttgctgtcctcacagcaccactctccatcatctgtcagcttgtgttaagctggcttcccttatggacacagaacagctgccaatagcaattagggctgtatgctacttctttcatatccagagaaagagagtgctttttcctacagccattgttggtagacagttctccatgggtctcttgtgtttctatatatcttgaatagtgactctggctgcctttgttatgaactagatttttgaggttgttcatatgagcaactttggaagatagaggttatgtcttcctccagagaaaagggaagatttgtttactatccaatataataaagataatgtctccctccatagcaaaatcagacaagtttgctgcccggtataaaagatttgggttccctttgctggacacggtggctcacacctgtaatcccaggacgttgggaggccaaggcaggtggatcacgaggtcaggagttcaagaccagcctggccaacatagtgaaaccctgtctctactaaaaatacaaaaaattagccggacatggtggcaggcgcctgtaatcccagctacttgggaggctgaggcaggagaatcgcttgaacccaggaggtggaggttgccgtgagccgagatcaagccattgcaccccaacccgggcaacagtgtgagactccatctcaaaaaaaaaaaaaaaaaaaaaagatttgggttctctttatactggtggtttctctcctaaaatgtgtctacatgtgcagacatcatctagtcctcttcatctctcactgtgggaattgcactttgagaaaacaatgcaaatgctgatactctggctactgctattgctgtagatcttggtctctgactcaggagtcttgtgtcttctgccaatacctgtgaaactgtagcagctaaccctttagcttggaggcaaagtaacatctgagacctttcacagttcttgacagttatgtaaaaattctgaatccacagagccaggcagaacttgtgctttcactaaatgtttgctttagtctgctctttctcatctaaactgttttcctccaggtttgtgcaatggcatcagctaagctaaatacccttcttcagaccaaagtgattgaaaatcaggatgaagcatgttacattttagggaagctggaacatgttctaagtcaatcaatcaaggaacagactgaaatctactcatttctgattccccttgttcgtaccctggtttccaaaatttatgagcttctcttcatgaacttgcacctaccttctttaccttttaccaatggtagctcctcattttttgaagattttcaagaatattgtaattcaaatgaatggcaagtttacattgaaaaatatgtaagttttatcttttttgatcaagatttttctgctaatttaccatttttatagaggtgaagtcatatattaaattttatgtatcttttttatttttttggtaagattgtaccttatatgaagcagtatgaagctcatacattttacgatggtcatgagaacatggcactttattggaaggattgttatgaagctttaatggtaaatatgcataaacgagaccgggaaggaggggaaagcaagctcaaatttcaggtaaaaagtaaatgttttaatatctagtttttcttgttgattttaggcatttaatattgattaagagtaatacaggccccaaactttaaaacaagcagtatttcttttatttgtctaaaaattatcttagaattagaagaaaaacagctaatcagtaacaagatcaattaatagtaaaatgttctatatagtgattatgcaaaaagtttattaagctgatagtacgttaatagatccctctaaggaggctggatacataccatcacttagagggaaatttacaggacataatgtttatattagaaaagaaaaaggcatcaaattttaagtttctaccttaagaaactagagaaatggccgggcgaggtggctcacacgtgtaatccccacactttgggaggccgaggtggatggatcacctgagatgaggagttcgagaccagcctggccaacatggcgaaaccccacctctactgaaaatacaaaaattagctgggcatggtagcatgtgcctgtaatcccagctactaagggggctggggcagaaggattgcttgaacctgggaggcagaggttgcagtgagcagagatcatgccactgcactccagcctgggcaacagagtgagactccatctcaaaaaaaaaaaaaaaaaaagaaagaaaaacagagaaacagaattaatccatatccttataagcaaaagtaaggaatgagtaaagataaaaacagaagtaaataaaattgaaatcagaaaaataatagagaaaatcaatgaaaccaaggtcgaattcttcaaaatatcaataaaacagataaacttctagcaagattgacaaaaaaaaaaaggagagagagaatgatgtgaaaaattatttataccaggaaagaaagaggcagtatcaccactgactccccggacatcaacattgtaataagggactactacaaaccactctatgcacataaatatgacaacttaaatgaaatggatcaattttttgactgacacaaatttccaaaactagttcaagaataagtatataacctgaaaagtcctatatttattaaagaaatataatttatagttaaaaaccttcgtaaagggaaaacttcaggcccagatggtttcactggcaaattctaccacacatttaatggagaaattatgccactttctcagtctcttcaaaaatagaaaagtaggaacatttctagctcatttgatgagggtaatattaccctcatagtgaaatcatagaaaaatagtacaagaaaactgcagaccagtatctgtcaggaacatagctacaaaacaaatctagcaatacatttttaaaataatacattagatcaagcacagaggcttatgcctgtaatcccagcactttaggaggccaaggtgggaggatcattttacgtgaggagttcgacaccagccttggtaacatagggagactccatctctacaaaaaaattaaaaattagctgggtgtggtggtacgcacctgtagtcccaactactgaggaggctgatgtgggaggaacactcgagtataggaggtcaaagctttagtgagccatgatcccaccactgcactccagtgtagatgagcagcaagactcggtctcaagaacaataataataatggtaataataatatatgacacaacaaagtggaatttatcctcaggatgcaggactggttcaacatttgaagattaattaatatactgaaccgcattagtagtcttaacaagaaaaactacattatcatatcagtaaatgcagaaaaagcacttgaaaaaactaaacatccatttgtaatcaaagctctcagcaaactaggaatagaagggaaatacttaaacctttacaaaaatcctaccactagcttcatattcagaggcgaaaacctgagtacttttctctaagatagggaactaggcagggatattcattctcaccactgttagttactgttgtaccacaaatcttagcaagtatagtaagaatagaaaaaatatataaaaaagcattcacattgggaaggaaaaaataaaactatccaaagataacatgattctctgtgtaggaagtcttaaggactctgttataccagtaaattactacaaataagcaaggttagcaaggctacaggacataaaatcaatacacaaaatttaatcatatttctgttcactagcaatgagtaatgaatgggaaacagattttctaaaaatacttttacaatagctctaaaaataataaaatgcttaggtatcaatctaacaaaatatatacagcatctgctgtatatatgccaaaaactaaaaaacacttgaaacagattaaagaagacctaaataaatacagatagacactgtattcatgaattggaagactcaatagtcttaagtaattttaaggtgtatatatttggttaagccaaaatgagaacattgttcctttcttaacttaaaatatattgtaaacatcttcccatgccgggctgcaaagtattccattgttttatatattagtacatttaaatttatttcccattgttagactcatttactagtttttttctttattataaatagtattgaacatccctatagttatatttttgtggctatccaagaagatttctctaggataagtggaattactagtgtgtagtccttatgataaatactgttatatttccctgagagaagttctaccagtttgtattctcatcaacactttccccttaactttacctttaggttttctagaaatacctaatttaagaatatcctcatattattgaacctcaaaactgtggaatttatgtttaattaccatggagctgtcatgacttccttagttttctcagcaatgatctgttttaaatatttagtaacattgtattccaaaacaattgatttcctactaagtctaataatagttaacaataacaattataataacgacaaccacaagttattgagaacttgctatttttctagcactatattaagtactttaaatgttcatctttattatgacagttattgttaacctcattttacacatgagaggacactgagcctcagagaattagctaagagaaacaactaagctaaagataaagttagataagaaaattagctcagaaaagctaagatttgtatccaggtctaactccaaggcatgtatttttaaccacacattgctgtaatgtctctctaaaactgtttaaaattttaactgttctttttaatgtaattcagtgctggtttgtttgaaacaaattaatgctgtcattttagtttctaatagatgaatattgatgtgagttagataagccagtcttcggtttgtttctttgaaacctataagcattaatttcacagattaaaattatgtctttgtagtatacaatttctactttctttcctcttgagtctcattttagatgccttataaatcaaaagatcccagaggaaaattattttacttgacagtaagtaggaggttaattatcttgagtttaaaagttctgtgttgaggcactttccatttttgaagttcttcacgtgtttattgttggttggttttttttttaagttttaaaaaatataaatagattataggtaaaattatatcacacttcatcaaagaaaatgattctaatggaataagaaaagcctattggttacttagcttctttctcataatgcaagattttattggtcaaaaattttaaattatggaattaaaatgtaaatatacctgtaaatatatgagtcaatgaccttactttttattgtttctttcaggagctgtttgtggagccatttaatcgaaaagcacgccaagagaacctgaggtataataatatgcttaaacaacttagcagtcaacagttagccactcttagacgctggaaagcaatacagctctatcttacatgtgaaaggggaccttgggctaaaaggtaagaggatataattttattaagtactcctttttctttagtactctggtctagaaatttttgagcaaatgccccctttcactccaatttcttaaatgttcaattcataaaagggtgcttttaatcttatttattgtctttccatgaattataggtctgggatgattcgaggttgtattgttttttatcatacagttatttgccttcctttgaccctttgatatgaagtttattggactttagactcttagagagtgttaaaccaatttacttctgtctttctgataccacctctttgagctagggctaatgctgttgtatgtttgaatattttacaattcacttaactgatcctcagttacttctgttttgcttaattatattatcttttttttatacagccctttttaaaatgtggtaaaatgtacataaaatttatccttttaaccattttaaaatgtacagttcactggcactgagtatattcataatgttgtacaatcatcaccactgtccaacttcataacatttttatcacctaaaaaggaaatgctgtacctattaaaaagtcactccttattatcctctgtcccactccctagcaaccaccaatcagctttctgactgtatttattgcctgttctggttatttcatataaatggaatcatacaatatgtggctatttgtgtctgccatctttcacttagcataatgttttcattatgtagtagcatgtatcagtactttattcctttttatggctgaatagtattcccttataaggatatatcccttttctttatctagtcagcagttgataggcatttggattgttttccattttttggctaatttgaatagtgctgctgggaacatttgtgtacaagtgtttgaacacttgtttttaattctcttgagtatagactatgaatggaattactgggtcgtgtgataattctgtgtttaatttactaaggaactgccagactgatttccacagcagctgcatcattttatattttcactagcaatgtgtgagagttccaatttctccgcattcttactaacacttgttatttcctgattttttattatgaccctcctagtgagagtaaagtggtattttatgatttcatgttccatttcctaatgattaatgatgtttagcatcttttcacatgcttgttggtcatttttacatcttctttgaagaaatgtctgcgcaagtcctttgcccatttttagattgtttgatttcttttgttgaattgtaagaatgtatatataaatatatatatatatcgaataatagaccctgatcatatatatgattttcaggtatgtagattgtcttttcactttattaatagcagcccttttgatacaggaaagtttttaattttaacaaagtccagtttaatctattttgttgttgtttttatttttctgtttttttgggtttttttggtgtcatatctaagaaaccattgccaagtccaaggtcatgaagttttatccttatcttttctcctaagagttttatagttttagctcttatatttagatctttgattcacttgcaattatattgcctttatttgtagtaaaattattttttactttgaaaactattggaaatatcaaccatctgtatagctaattaagaactcccatttaacagtgagagagtaaaggtatcaagctgtcaagtctgaaagtccatgttcaaatcttatttctgctacctgtaaacctcatgtcatcttgggcaaataatgtagtctgttttagattcctcatgtataaagtgcagctacgcatactcactttggttctatcagagttatttggattaaatgagataaaaaatgtgagcagttttataaaatggtgctaaataggctgggcatggtggctcacacctgtaaccccagcactttgggaggccaaggcgggaaaattgcttgagccaggagttcgagaccagcctgaccaacatggcaaaaccccatctctactaaaattacaaaaattagctgggcgtaggggcacatgcctgtaatccctgctatgtcaggaggctgaggcacgagaatcacttgaatccaggaggcagaggttgcagtgagctgagattgtgccactacactccagcctgggtaacagaatgagactctgtctctgaaaaataaaaataaaataaaatggtactaaacaaatgtaaaatacttgatacttttttacattatttaaatcaaacaatctttgtaacttaagctaaataattttacttatttgcttatgaatattcttaggaaacagaatccaattcactggaagctagctaatgtagagaattattcccgcatgagacttaagctggtaccgaattataatttcaaaacccatgaggaagctagtgccttgagagataatctgggtgagttccaatgactgtttaattgtttgttgaagataatgagagtgttcgtggggttgacgattgttattttattgttttaaatgtgtttacttatgaaggaagggtggcattttataattgatatttaagtgactatatgttttcagtcctgttacatttggcctaaatccaaggtgatttaatacttccattgattgtaatttctaaaagaaaaaaaaattttaattataaaagtatactgtacttcatatcaactgttatgtctcttgcaatgaaacaatgttcttttctcttagtttttttgttcatcaagactgaggctaatactaatgttagatagaattcttagcaatccttttttttcttttcttttcttttttttgagacaaaagtctcactctgtcgcccaggctgaagtgtagtggcgcaatctcggctcactgcaacctctgcttccagggttcaagcaattctcatgcctcagcctcccaagtagctgggattacaggcatatgccatcacacctggctaatttttgtatttttagtagagatggggtttcaccatgttggccaggctggtctccaactcctgacctcaagttatcctcccaacctttgcctcccaagtgctgggattacaggtgtgagccaccgcacccagccataattcttagcaatcctttatgccttttattataacctatttttatagtgctctagacccttagtatcttagattggccaatgcctttttctagaaaaaaaaaaaaaactacttgaggtcaggagttcaagaccagcctggccaacatagtgaaaccccgtctctactaaaaatataaaaaattagccaggcatggtggcgggcacctgtaatcccagctactcaggaggctgaggcaggagaattgcttgaacccgggaggcggaggttgcagtgacctgagatcaggccactgcattccagcctgggcaacaagagcaaaactctgtctcaaaacaaacaaaaattttgcctgacactatttcaaaacagatcttaacgggtttctgcaactctttaggaagcctttcctttataactgtctcacttgtcttctctcccttttttaagataggtctgtgaaataccccaaaatgttgtttatcaagaatcactgggcccggcacagtggctcatgcctgtaatcccagcattttgggaggccgcggcagcagatcacctgaggtcaggagctcgagacctcgagctggccaacatggtgaaaccctgtctctactaaaaatacaaaaattagccgggcatggtggcgggcacctgtaatcccagctactccagaggctgaagcaggagaatcacttgaacccgagaggcagaggtggcagtgagctgatatcgcgtctttgcactccagcctgggtgacaagagcaaaactcctcctcaacaacaacaacaacaacaaatcattggtagtcataggcatattatgttgtagttttagatgacaggagtaccaacttttagatgttatttttaaactatttttatttttttgagactgggactctctctgttgaccaagctagattgcagaggcttgaacatggctcactgtagccttgacctcctgggctcaatcgatccttctgcctcagcctcctgattagctgggactaccaatgcataccaccatgccatgcccagcatttttttttttttttttttggtagagacaaggtctcaccatattgccaggctggtcttgaactcctaggctcaagtggcagtccttccacctcagcctcccaaagtgctgagattacagacttgagccggcatggctggccagatcttattttttttaattgccctaacatatggccaaaacatttgatgccataaaatgaatcaagagagctatgatgcctgccatttagagtcttacattttgaaataaatcagatacagtaagtggttttccttaattcaaaataatggccctgtccatgatataaacactaactttgagtgttatcttacatagcaatagccagttgtgtatagctttttctctgaaagaatcttgtatcctcttctgtaagtatctttctctactctttgaaatgtaactatcattaacacccaacaaacatcttttggtaaatgactttaatagttacttaaggcatagtgttccatattattttctcgacttttgccaagaaatttccttccataaagttccctctgttttttcctctccttctcacccctcgacacatgcacacagatgtaattttatgtcccttcttagtctcagttgttctttttgtttttttttctcactttaaaaatttactccaagtgagccgggcgtggtggctcacgcctgtaatcccagcactttgggaggcggaggtgggcggatcacgaggtcaggagatcaagatcatcctggctaacatggtgaaaccctgtctctacaaaaaattagccgggcgtagtgacgtgcacctgtagtcccagatacttgggaggctgaggcaggagaatggcatgaacccgggaggcggagcttgcagtgagccgagattgtgccactgcactccagcctgggcgacagagccagaccccgtctcaaaaaaaaaaaaaaaaattactccaagtgtaatagtgacaataaaactgtacagaaaaaaaaattatatatttcaaggtgaaattggaaatcataaaaaaaggcatcagtctttaatatctttaaagttctttgaagtatacttcagaattaactgcaaaatgttttgcctactccttagttttgtctactccttagttttgtctatatttccgttaactgccagaattcatggttttctttttttaaaatattatcttgttttgttttacttactccaatactgctttttataagcaacccattgcagatgtatagaatagtgttttcattatgggctaacctgcaaagctaaccatgatttaaaatattattttggatggaaaatccattattaatttcaaacagctgacttatgaagcaccttttggaacacacccacttgtaaattagggaatttgaagagtgaaaaagtaaatatattcttaaatgtatcagtaaaaatatttggtttgtagtatgggcaacatagtgataccccatctctacaaaaaatacgattttttgtagcatggcacatacttgtagttggagctactcagaggtgagaagattgcttgaacccaggaggtcgaggctacagtgagccacgatcgtgtcactgcactccagcctgggcaacagagtgagaccttgtctcaaaaaaaaaaaaaaaaaaaggtttggtttggctaggtgtggtggctcatacctgtaatcccagcactttgggagtccaaggagaagagttgcttgagcccaggagttcgagaccagtctggacaacataatgagacctcatctctacaaaacaaattttaaaagtcagctgggtgcagtcatgtgcgcccatgatcccaggtacttgggaggctgaggtgagaggattgcttgagcccaggagattgaggctgtagtgagccatgattataccacttcattccagcctgggcaacacagtaaaaccctctctcaaaaaaaaaaaaaaaattgatttaagaaattttttttgtctgtacttctctattagacatgctgttttctgattggcaaacttaacaacttatttttggtcctcaccttgcttccattgtttctgaagcatttagtggttatccttctctgtaagtgtatttctttccttctttcttttcctttttttgtttgtttgtttgttttgtgagacaggatatctttctgtcacccaggctggagtgcagtggtgcagtcaccactcattgcagccttgagctcctgggctcaagtgatcctccttgccacagcttcctgagcagctggtactataggtgtgtaccaccacacccagctaattttttaatttttaaactttttttgtagagacaaggtcgccctctgttgcccaggttggtcttgaatttctgggctcaagtgatccttccacctcagcctcccagagtgctgggattacaggcatgagccatcacactcagcctgtaaatatatttctttcttagctctgctgcttaacctcctactttttataccaacttttagtctttttttctaaaacttttttcctgcacacctttaaatgatgatgttcccagatccattcctagaatcttgccttttacctgtgttcttcctgagtgatctcatggctaacccaccatatatgtaatgctcctttcccatctgtatttctagttccaaccttccttttgaactctagaacaatgtttccagctgcctgttgggatatctcttacacagtctccgtatgacatttctgaaactgaatttattatcttttctcatatgtgtattccttaccctagtttctacttctcttgtatctggtattgtagttatcaatatctccatatattagttgctgaaattaaaatccacattatccatgagtctctcctcatatctctgaaattcctacatataatagctctttaggtactgtgtctggttgattctatctcttacataacttttgaatgtttttccttattttcattccctttgctattgccatggcttagcttggtgctttctccaaacttacagtagcttgccagctggcctccttgctgcagtccatccttcattctccatccttcaccaatctttcatcagattttcaattcatactgttaacagaatagtaccatacatctatataaagtcaatttcctatttgtatcagactacctaggcttccttcttttcactttttattgcattgtcatgtacttcgttaattaaatgttttaacaataaattagacctcatgaaaaaacatgttcagtagaaatagttactaacttgttctagggaaaatgtgaatcactacttcccaatgtagagggtatgatcaaacagatttacacagaaaaatgcagctgtacgttacgttgattcatcttatgtctgagcaacggtatcatttgagaagttaagggaggatttgtcgtctttatagtgttttgttatttatagttatttgcagtattgtgttattttatatattgtgtatgaattatttttgccataaatgaaatgtctttattcatcaagttaagtatgttaattttttttccaatcctataaattatgcatatatttgtattgctgttcttatttcaatcagatagttggaagataaatatataatagtagctatcatttattttatatttaatgtgtaccagatgtttcacatatattacctttcatatacataacaaccttgtgatgaagtctccattttacaatttagaaaacataaattcagaagggtcattggcttaataactggcaaaactaaatttgagtctaggttcaccacttcatagaccatgttcttttcattataccagacctgcctttttacaggatgtttagtttataaaatacattacatgtattgcatataattgcctcggaattatgtattaagttccatgtggtccagaaagtaaacactttcgctcttggtctgtgtattatttcccaattaaagacaatttgtcatatattcttagtattgcttttgtacaaatgcacagtaaaaatggttctattacattaatacaattagaatatttcttcctttgacttaattattggcaacctttagaattaaatataaataaagagagtacttggcctatttctgaaacaaataatactgttattaaaaatagatactattattttttaaacatttattctttttaccttatgaatagtagtggtcaaaatcgccatcaaacgtgaaggattactctaaatcaaagtaccgtctttacttataatatacatattgttatatctaacagtcaggaacacaattagcagtcagaaattacagaaaggctataatattgttttttactttatgtttaatagatattttgtgtttaaaacaggtatccaacactcacagccttccagtgatacattgcttttggaagtagtgaaacaagtaaaagttagtgatatggtggaggataaattagaccttcctgaagaggatataacagctagagtaaatgtgtatgtataaatatttaaaattattttgttctgagaaaggggattgcaaaatcgtggaaaagatttgcttgaaattctaacaccatgtatttccagggtccaacagttaatgctgtatcagctgttaggattttatcagtattaactgagattattgaggaaggcttcttagaactgggataacatggaactggaccttgaaattagaaaatatttagaactgtacgataatgaaagcagtacatcgaatttgtgagattcagctatacctgtgttcagatggaaatgtacagcacaaaatataaactgttaagcaaaagaaatagcattataaagacaaagcagaaattcatgaaagagaaaaacaaaaagaaagattaaaaacattgaagcctggttattaaaaacaagcaaacaaaaagcaaaaaacataaacctctagccagactgattaaaagaaagacaacataatttgcctatattaggattgaaagaggagatattgccacaaataataaaatgactgaaaagaatagtaataactttatgcctgtaagtttgacagcttaatgaaacaaattctttgaaagatacaaattacccaacctctgcaagaagaaacagataacctgaaaagccttagatacattttaaaatttttaatttgtacttcaaaagctctctttaagcaaatgtaaaatgtattaatttcctcatctcctctttgtgtcactactgtcatacgtattacatttctttgtataagttcagtaatacagtttcatagttgctgttttatgcagttgtctttaaatgaattataggaggaaaacaaatatatgttatttatgctttgtttgctacataattatcaagtatcatacttgtgcactttatttctttgtgtgtacattcatttatcatctgatatcatttcctttcagcctaaaagactttctccagtttttttgtgtgtgtttttctgtagggttttttttttttttttttttttgagacaggatctcgctgtgtcacctcaactggagtgcagtggtgtgatcacagctcactggagcctccacctcctggtctcaagtgatcctcctgccgcagcctcctgagtagctgggactataggcacaccaccatgtctagctcatttttaaatttttttacggagacagggtctcactgtattgcccaggctggtctcgaacctctgggcccacatgatcctcccgtcttggtttcccaaagtgcttggattacaggccaccagagagtgagccgctgcacccagccctctagtatttctaataaggaaggtctgattgccacaaactctctgtttcttatccagggaggtctttatttttgttaatccaggtatatctcacaaacataaaatttaccatttttaatgcatacaatacagtggggtttttttaatgttttcacaagtttgtgcaaccatccctactatataattccagaacatttatgtcaccccaaaaggaaatcttgtacctttgagtggtcggtcccagttttccccttctcacataacctggcaaccactaattactttgtctctgtggatttgcctactttggacattttctgtaactcctacaatttgtatctggcttattttcatttggaataatgttttcaagattcattcgtgtcatagcatatgagagtactttattcctttttgtggctgaataatattttaaataattttccatttataaccatttatggttatccagaatatggataatcacattttgcttatccattcatcaatcatgagcatttaggttgtttctacttttaggctattatgaatagtacttccatgaatattcaggtacaagtttttgtgcaaacataagttttttgttgtcttggttatctactgaggagtataatagttagatcatatgataattctgtttgaacttttgaggaattaccaaactgttttttacagggactgtgtcatttttcattttcaccagcaaggtatgagtgttctaatttctccacatctacctcaactcttgttattttccttgtggttttgtaaaaattcattatagccatcctagatggtttgaagtcgtttctatcttatttgcattttcctagtacctaataatgttgagcatctttccatgtgcttgtttgccattaatatatatctactttggagactatatatgcaaatcacttgccccccgctattttttttttttttttttttagacaaagtcttgctcttgtcgcccatgccagagtgcagtggcgagatcttggctcactgcaacctctacctcccaggttcaagcaattctcctgccttagcctcctgagtagctgggattacaggcatctgccaccatgctcccgctaatttttgtacttttagtagagacgggattttgccatgtcggccaggctggtctcaaactcctgacctcaggtgatccacccgcctcggcttcccaaagtgcctggattacaggcgtgagccaccacgcccggcctggttctttttttaaacgtttttaatttctgtctctttattgatagtctctatttgatgagcttcattgctgtaattccctttaattctttaaacatagtttccttttgttcttttgatgtttttatgatagctactttgaagccattgttaaattgaacatcagaggtcccccagagacagtttctttttactgcttttgtgtttatggctcatactttgctttttgttttctcataatttttgtaaaaaaaactatacatttttggtaacaaactgtagccaatctggcttctgatctccctctgttatggttgttactgttgtgattttgtttgtttgtttactttcccgaactaattctgtagagcctgttttaaccggctgtgtgttgccaatgacgtctctattcattggggtttttttgttttgttttttgttgtaaaacctggcctagtagggattgtctgtgggtcagcatagcttggtggtcagtcattggttagaggttgtgtttaacccccccgatccagctgagtgctatagctcatgagtataatcccagctattcaggaggctgaggcaagaggatcactaaagggcaggagtttgagaccaacctgagcaacatggtgagaccctctctctaagaaaataggccagggaggctgggcacggtggcttacgcctgtaatcccagcactttgggaggccgaggcgggtggatcacgaggtcaagagattgatatcatcctcactaacacggtgaaaccctgtctctactaaaaatacaaaaaattagccgggtgtggtggcaggtgtctgtagtcccagctacttgggaggctgaggcaggagaatggcatgaacctgggaggcggagcttgcagtgagccgagattgcgccactgcactccagcctgggcaatggagctagactccatctcaaaaaaaaaaaaaaaaaaaataggccaggcgtggtggttcacgcctgtagtcccagcagtttgggaggcccaggcaggtggatcacaaggttaggagattgagatcatcctggccaacatggtgaaaccctgtctctactagaaatacaaaaattagccaggcatggtggcacgtgcctgtagtcccagctactcaggaggctgaggcaggagaattgctccaactcaggaggcggaggttgcagtgagctgagatcactccactgcactccagcctgggtgacagagcaagactccgtctcaaataaataaataaataaataaataaataaataaataaataaataaataaataaaagccagcatggtggtggtgtgtgcctatagtcttaactattgggaaggctgaggcaagaagatactttgagcccaggagttgaaagctgcagtaagctatgatcaccccactgcagtgaagcctgggtgacagagccagaccctatctctaaaataaataaataaataagcaagacccgcccatctctaaaataaacaaaccccttgatccagtaagactgccatcctttgccagtggatctgtacatggcttagggattacctttgaagttcatgatttgtatatctgccctaatgtgagttttgggggttttgttttgttttgatttgatttgattttttttttttttttttttttgagatggagtcttactctgtcacctaggctggagtgcagtggcgcgatctcggctccctgtaaccaccacctcctgggttcgagtgattctcgtgcctcagcctctcaagtagctggaattacaggtgtgtgccactacgcccagctaattttttgtattttttgtagagatgggtttcaccgtgttggccaggctaatctcaaactcctgaccccaagtgatactcccaccttggccacccaaagtgctgggactacaggtgtgagccactgtacccagcctaatatttaactttctatgttgataaagccacatattcagccaagaatgagtagctatgtcccaaatatattatttgtttacattataaactacatatggcaaatatttctttgaagctcattttaatattacaaattgagggccaggcatggtggccctcaatttgtcagcactttgggaggccgaggtggacagatcacttgagctcaggatctccagaccagcctggacaacatggcaaaattccatctctaccaaaaatacaaaaaattaacttggcatggtgatgtgagcctttggtctcagctacttgggaggctgaagtgggaggaatgtttgagcctggaaggtggaggttacaatgaagcaagattgcagtgattttatcagattttctctaacaaaaatatattgtttgataataagtgattacatgtaggacttcaatactgtagcaaattaatataatatcaaaaagcacaacattgtattcaaataaatagagcagtgaccaagtctcacaaaaaatatatatatagtcttcctcagccaggtgcggtggctcacgcctgcagtcccagcactttgggaggccgaggtaggcggatcacctgaggtcaggagttttgagtctggccaacataatgaaacccgaaacccagtctctactaaaaatacaaaaattagccagacatgggggtgagtgcctgtaatcccagctactcagaaggctgaggcaggggaatctcttgaacctgggagaaagaggttgcagtgagctgagattgcaccactgcactccagcctgtgtgacagagcaagactccatctcaaaaaagaaataaacagataaataaatatagactttctctttaacatatttgtaactccttctccacaggtgaaaaacctggataccattactctgaataagcctacttatttagtcaagcctagaatacacagaaagtgctttaagaattgcttaactcatatcattagttgctaactcattccactgcaaaaaagcaaacagatttcaattttgtttaaagtccttttttctttaggtaaaatttacaaacagtaaaatataaaaataattttatattctttttatatattctaaaaactgtagaattttatgaatcttgacaaatactcataacctgtgttataaccctcaccccaaaaagatactgaaatcaccttctccccagaaaattctctgtgttcttcccaatcaatccttcctccttcatcctcccaaaggcaatttagacttttttccactacagattaattttaccggttccagaaattcatataaatagaatcataccatgtttctgttgttcccagttcttttcactcaggaaacacaactgtatatatcagtagttcattattttttattgatgagtggtatttgttgtttaaatataccacaatttctttaatctccagggttatttcagtttgggattattttgaataaagctgttatgatcattctcgatgtggttttaatctgcaattcccttatgtatagttgttgggttcttttttatgtgtttggtgacccttcctttgtgaaatgtctgttcaagtcttttgcccattttttaattggttgtcttttttcttattcaactgtaggatattttcatatattctgtatacaagaattttttcagatgttttgtgcatatttttactcagtctgttcctcagtttattttcttaattgctttatagaagtttataaatttattaatagattatacctattatattaatacatgtgattaaaaactaacttttccttttttggcatgtcaaataaaactttgtacaatctttgagagaaaaaaaaaagattgcaccactgcactctagcctgggtgtcagagtgagaccccatctaaaaatatatatatattacaaattgactagattcagtagtatcctttggtggcataatcaggacttttacttgtattagttcagtaattttttttagatttcctttattattttcagggtactgggtaggggcagttatatagggaactatcttggtagatactcagttggctttgtaattgggattttttttttctttctttgatgactagtgaatttaatggatgtcagactcatttgttttacactgaagaaccaaaatactttttgtcatttaatataaataaccctcagactatttacttttttagggttactcatggctctatttatcactgtaaatattagtatttcagtgtttgggaaaacattctttccagtaattattttttaaaaaaagaaaagcttagttttaaataaatgattgcaacattgcaagcttaaaatggtgatacagaacttctcatggaaacccactaaaaataaaattagacttagtcattggtaccctggacatgaggcagatatgaaatgtctaggaccagagagttagctggcttaaaagatttacttgaataacattctgtgagtggtagaagctcccatttctctttttttttttttttttgagatggagttttgctcttgttgcccaggctggagtacagtggcgtaatcttggctcaccgcaccctccacctgccagattcaagcgattcttttgcctcagcctcccaagtagctgggattacaggcatgcaccaccacgcctggctaattttgtatttttagtagagacggagtttctccacgttggtcaggctggtcttgaactcccgacctcaggtgatccgtccatctctgcctcccaaagtgctgggattacaggcgtgagccaccgcgcccacccaggagctcctatttctatacttggcagttaaagtcacctaggccaccaaaagactgtctctccagttacttcctccagcaaatataaataatattcctcctaatatatggtgacttcactttaagtaaggtatggcaatagtagctctttgcattatctctagttcccttgttaggggaatgctatgatggtaatgctctctagttttagttactcttgaaagtctcattttatagtttaagattcatatttagtacttctaattattatttacaaacaccactacaatgcagtcttagtcacagattcctgtattttgtgggtcaattcatgtctcccagaatataactaaaatgacatgaccaatattgccttatttttcagctgtcctctgctaattgttttacaggttcactgtgttttattataatgggtcatataaaatcaggatgtaaagcttatttttaatgaaactgaatcattgagtaataaaaatatttggatactgtttaagtaatttaatatgcagaatacttcttgagggtaattcagatattctttcctggacattaatttgacagataagtgatttatatttgaggccaggcacagtggctcatgcatattatcccagcagtttgggagaccgaggtgggtggatcccttgagctcaggagatcaaaaccagcctgggcaacatggcaaaaccccacctctataaaaaatataaaaattagctgggcatggtggcatgcacctgtattcccagctacttgggaggctgaggtgggaggattgcttgagcccaggaggcagaggttgcagtgattgagccgacattgtgccactgcactccagcctgggtgacagcaagaccttgtctcaaaaaaaagaaaaaaaagagattatatttaaatgtggcattcttttctatttaagaaaaataaatggttgaatttttctgtttattggcttcttgtttttacagtgatgagaaagaagaacaggatcaaaaagaaaaattggtattgatggaagactgtgaactcattacaataattgatgtaattcctggcagattagaaatcactactcaacacatttacttctatgatggcagcattgaaaaagaagatggtgaggagttctggaaaaaataatttttgctgttcaataattaagtatctaatttatcaatcatgaatgagaagaagaaagcagtaagatataactatcatgtgaagggagaaatggaaagtcagtaaggggtcaaatttgttattcaccaaggtgtggaagggaatgctttttaaaaattatcaatgcatttttaagggtttggctagagggaattgctgtaaacttaagttacaaaatacagtgtttattattattatttttttgagatggagttccactcttgttgcccaggctggagtgcaatggtgcgatctcggctcactgagacctctgcctcccgggttcaagcgattctcctgcctcagcctcccgagtagctgggcttacaggcatgtgccaccacgcccagctaattttgtattttttttttttttagtagagacagggtttcttcatgttggtcaggctggtctcgaactcccaaactcatgtgatctgcccacctcagcctcccaaagtgctgggattacaggtgtgagccactgcacccaacctaatatagtcttcattttatcatacctttgtatgtgtacttattcctataggcttctcatgtcatcctttatgtgataataaaaggatgaataaatctaagatgccagcatacagagaaaaggaaaactgtttctgagatgtattcagaattatattgtattctaatgggaaggcagtagaatagttatagaactttaaaatagtttaaaagaaccagtttaaatatccaacacatttaacaaatggtttatatagtacagaaattgaattcctttttcctaaaaccttttgtcaagaactaagaggtattttctacttagcatgagtaactttatatggtatctcagtcacaagatttcttccgttttcaggagtaggctttgatttcaagtggcctcattctcaaattcgagagattcatctccggcgttacaatttaagaagatcagcccttgagatttttcatgttgaccaatccaactactttctcaatttcaaaaaagaggtatgtattatggtttcaggaaatcccaaaatgctagctttaaatacgtttccagctagtgagctctaatggaactttgggctgtattcttttatcaagacaaaatgttagaggaaaaaatacatactttgggggctaatcagtgtatgaatttttgttgagatttatatacgtttgagttttgggggagctcagtttttatatatatggctagataaagtagaatttttagtgcctcactacattcacttgtgatgtaatatacaatatgtaagctatgacaagatttataaaattagattggtttcaaattaaaaaataatgaggaatctatttcttctaggaatatagtaaattcttaagtaatgtaagttgttaagtgcatatgctctaaagccacattaccagggtccgtgtactgtctccaccagtagctgtgtaagcttgggctcattactgagaatgcttgggcccggccttcctcccctctctcattcacttgaggtcagacaggtattattacagtttgacagctctccccaccttgcatagctctcccattttctctcgtaggcgtctcccctagtaaaatattcgcattttaattgtgtcttggcatctgcttttcagaagactcacattagcacacacaataactaattttccattcttctgtggaacccaggttgacttattgatggatttgattaagatgtttaaagaccattcttctagttttacaaaagtctttttactgttacaagaaagttttccttcataggaaaatacaaagcatgtgttttatggaaagctgtgtcatgtaattaaactaagtctgcccctgctaagtactgggtgtttgtataactttattgtctttaaagtacatttctataaagtagctaatctttataacaaccatgagattaaatgtggcaaatttggccagacacagtggctcacgcctgtgatcccagcactttgggaggccgaggcgggtggatcacctgaagtcaggagttcgagaccaccctggccaacatggtgaaacaccatctctactaatacaaaaactagctggtcgtggtggcacatgcctgtaatcccagctacttgggaggctgaggcaggagaatcacttgaacctgggaggcagagattgcagtgagccgagatcacgctattgcactccagcctgggcaacaagagtgaaactctgtctccaaaataggtaaataaataaggcagattctggctgggtacgatagctcacgcctatagtcctagcactttgggaggccaaggtggctggatcacgaggtcaagagtttgagaccagcctgcccaacatggtgaaaccccatctctactaaaaatacagaaattagctgggcatggtgatgcacacctgtaatgccagctactcgagaggctgaggtaggagaattgcttgaactctggaggcagaggttacagtgagccgagatcacgccagtgcactctagcctgggtgacagagcgagactccatctcaaaaaaaaaaaaaaaaaaaaggcaatttccattattccttttttaatagttaaagaaactataagtgaattttataactttgcatttgtatagccctgaataattcacagtactataaggataggtattatgtttaatttaatttatttgccaagatgattagtaaattgcagaactaaatttgaagtatacttgagcaagttttctaattccaagtctaataatatttccgttatacatgataatttttgtaaacatacatagcttgatttcagcaagtacaatagggtaattaaaaccataatctactgtttatatgaaatgtccagaacaggcaaacccatagagacagaaattagattaataattgtcagggaatgggaaggaggcagaattgagaagtagctgttagtgactatgggatttctatttgaggtgataaaaaatttctgaagttagataatggtgatagtcacacaactgtttgaatatagtaaaaaaaaaaaaaaaaaaaaaaaccactgaagccaggtgtggtggctcatgcatgtaatcccagcactttgagagcttgaggtgggaggatcacttgttgtccaggagtttgagatcagcctgggcaacatggtaaaaccccatctctacaaaaaatacaaaaaaattagccaagatcacaccactgcactccagcctgggcaacagagactgtctcaacaaaacaaaacaaaacacacaacactaagttgtatactttaaaagggtgaattgtctctcaatacagctattgtgactaccataatcttccaagtttgtcttgattcatttttaaagtataaaatgctgttttttataggttagaaacaaaatatatagccgactgttgtcacttcattccccaaatagttattatggaagcagatcaccacaggagttattcaaagcatcaggattgacacaggtaggaaattgtaatagtctctaatgaactgttctgctcttcattttaagtaaaacttgacttcttctgattttcctttgatttttacaactgctgttcttccattcagactgatcttttgaattatctttgaatcttcctttgtttccctcacacagacagtgccctccctgccacctcctgtatcattcagttcatgggtatatccgttaataattttctctttttaaaaaataaggctgggcgcagtggctcacgcctgtaatcccagcaatttgggaggctgaggcaggcggatcacctgaggttgggagttcaagaccagcctggccaacatggtgaaaccccatctctactaaaaaatacaaaaagtagccaggcatgttggcgggcgcctgtaatcccagctactcgggaggctgaggtgggagaatcgcttgaaccggggaggcggaggttgtggtgagctaagattcgtgccactgcattgcagcctgggcgacagagcaagactctgtcacaaataataataataataataacatgggttttaaaatcttaataataaaaataatcaatgcatgaggtttaaaaagggcctggaaagggccaaaaaatgccaattctcctaccagccaaagtgaattaatgctctcatgaattatattcttatttatatcccagtgtcacttggatttgttctgccaggacgcaaaggaaagccgttgtttttggctttccaggactgttcgtagtctcttaatcagggtctttgcttcctggctgtctccttcctcccacaaacacattaatctttcttaagtgttgcccttattcaagacccatcagcaattctttactattgccagtgaaaaaagttttatttaataaagtacgtttcctgttgcctctgcaataaactttattctttaagtgctgatccctcaacttggcactcaagaacaattgggctacacctaagtatcctctgaggataattaatgtaatgtttcattaaaatagttggatagttttaatatatcaagacactgttttttaatatgcatacttatgaaaatttcaatttgtaacaaaaatttctaagtggaatagtcctaaaattcgaaattttaggccacatgcagtggctcacagttgtaatcccagcactaaggctggtggatcccctgaggtcaagagttcgagaccagcctggccaacatggtgaaaccccatctctactaaaaatacaaaaaattagctgggcatggtggtgggtgcctgtaatcccagcgactcaggaggctgaggaaggagaatcacttgaaccctggagacagaggtcacagtgagctgagatcacaccattgcactccagcctgggcaacaagagtgaaactccatctcaaaaataaaaaagtaatttaaaaaatgaaataataaaataaaatgtgaaattttaagacatttattctgggcatggtggcatatgcctgtaaacccaatgctttgggaggtcaagccaggagcatcacttgaggctaggagtttgagaccagcctgggcaacaaagcaagacctcatctctacaaatagtttaaaaaattagccagtgtaatagggcatgcctttagtcctagctacttgggaggctaagccaggtagatagcttgaacccaggagcttgaggctgtaatgagctgtgattgcttcactgcactccagcctgggtgacaaagtgagaccatttctctgaaataaataaataaataaaataaaaattttaaggtattcaaataaaacatgtaattgaagaaaagacaaggttttttttttttaggaaagaatttttatcaagacctagactgtggtataagatttatgttgaattttctgttccttttttagagaccaatattttaaaagaagtaaatttaggaaaagtatattgatttatctccctgttgtaccttttttttttttttagcccattcttggtactgtcagtaatagctaccaatgtctaagagatgtagatttttaaattttgatattgctcttttttgtgctgtctagaaatgggtaaacagagagatatcaaattttgactacctcattcaaataaatacaatggcaggacgaacctataatgaccttgcacagtatcctgtggtaagttttgcataaaccttataaatgtggaattgccctacagttttataaatcacataagtatatacatgatacttattttttatttaaaaaatataaaaacactttggcctttctgtatgttttctacccagttattttcaaaaagtatataaacatgaaaactaatttaaataaaagccttttttctttcacttccttgaaaatatccagtggggcaggtgcggtggctcatgcttgtaatcccagcactttgggaagccaaggcgggtggatcacctgaggtcaggagtttgagacgagcctagtcaacatggtgaaaccccgtctctactaaaaatacaaaaattatctgggcgtggtggtgcacacctgtaatcccagcaactcaggaggctgaggcaggagaatcgcttgaactcaggaggcagaggttgcagtgagccgagatcatgacactgcactccagcctgggtgacagagcaagactttgtctcaaaaaaaaagaaaagaaaagattccagtggaattataggaaataatgcttctggttattgaactaaagatgaatggatatttacaacagggaaaaaatatttttagagactatccctttttgtctttagataaccatttgatattagatatgaggatattagcttctctaggaaggaatgtctaaattgtaaattatggctcttttagtttccctggattttacaagattatacttcggaagagttggaccttaataaccctgctgtatttcgagatctttccaaaccaattggggtagttaatgaaaaaaacgccaaagctatgagagaaaagtaagtgcttcttattccttttataaaatacacattgcttctttgaatttgtattgattttttactatggccaaccaaaaaaattttttttttatcgtactactacttttgataatcagagtctgataattacttcactaagttttcttgaaaataacttggttgcctttcagaaatcttgactatacttgtgttgatttcccttcatcaccaaatttaaattgatattgctcagaatttctttttaccatgtaataagtatgtgctaaagagtaataaattcttgaaatttttcttcccagatgttttaaactttataacttaataatcaaacatattaaagtatctgtctaatataatatttgggtagatatacaacttatactgatgtgttttcagtaataatgtgaataaagaagagagaatgtgtggcaatttagaacatgtcattttgataagaagaagaagattttatagttctgtttatgatctaccctgtcaacttctcacaattaattttttcaaggcaagctgcccacaggcaacagaataacctgattttaatttccctttttctccctgtgaacttagggatgacttttgagttttgaattctaataataaggacaaaactattttacacattaacttagttatagattgatatgaaagtaggtggtactttttttttctactttttctttgcaaaccttccctaggatttttataatgtttgatatttgatttgacttgatttaccagtggaactttgctgtgtatatatgtataccatcactgccattagtcaaacttttttttctgataataaccaaaagaagattttataattctttaaaacagtgttctaaggaaacactcatataaataacttattttattggtaattaaagatacaagttgttttacattttagtggtacatttttgcatagatacaaatggctttgacctgaaaacttttttattctcctgaatattaatgagtagtatgtaaaaggaaattggcctcagcttaatgaacccattactattttggtttttgaaattcagtgtttatggcctacaaaaatcttttattcttatttagattttatacacgctaattcagatgtcaccattcagaccaattatgcatgtatcagtgatagaccttgaagaatcactgtatatcttttggtaataatctggtttaggcctttttcctatccaccatctcttttttcttttacctttagatttctaggtatcaattttcacaattcttgactggttcttccttttttttttttcctgttaccttggccacaaaaggatgtttaattatcacagtgctttatactagcaaaaaaaaaaaaaaaaaaaaaaaaaaatacaaggaaacaatctaagtgtctaaaaagtaaagaaatagttaaattgtggtacatctatacagtattatgtacctgttaaaaatagactactcagtcatttggaaagatgtctgtagaaaattgttaagtgaaaaattgttaaatgaaaaatatattgttatgaacaatatatgtagcacttttatgtgaaaaatatttgtatattaattcatacattaggatagatattcaccaaaaaatttgtgttaattatctctgggatgtggaattatagttgattttaagtttcttctgttttgattctctattttctaatttttctacaatgaacatgtattattattgcataacaaaaactattccaggctgggtacggtggctcacacctgtaatcccagcactttgggaggctgaggcaggtggatcacaaggtcaggagatcgagaccatcctggctaacatggtgaaaccctgtctctactaaaaatagaaaaattagctgggcgtggtggcaggcacctgtagtcccagctacttgggaggctgaggcaggagaatgatgtgaacccaggaggcggagcttgcagtgagccgagagcgagactctgtctcaaataaataaataaataaataaataaataaataaataaaaataaaaatgaaaactattccagaattaagtgtttatgatattttgttgttcagaaaaaagtattaagcaataaaatttttttcgttttctagtatggtataatgatatgaatacagagtttgataatgaggcatatgaagaaggatggactttttaaaaactgtattttcagaaataaaatacaaacttatgcccccttatgtactttattattgtggttttaaaactttaggattttttccccacagatatgaaaattttgaggatcctatgggaactattgataagtttcactatggtactcactattcaaattctgcgggggtcatgcactatctcattcgtgtagaaccgttcaccaccctccacatccaacttcagagtggaaggtatgttttgagtaaataagctatttttttatgactatgttagtgttgaaaactgtttgccttcatgtcatgtactgtgtaacatgtcttttttattctcctgtattaaattttgatcagctaaaaataaactagtttgagaatgagtcactcaaactgtctcacacaagtgatttaaggagaattcctttttcagtgttatcccagtgtacctttgtgattcttactgttttgaggaatctaccagagatttataattagatctgatttagagctaaatctaaggcatcaccggagagtcaaaccaatccaatgcctatgcctatgtagtcctaaaaatatgtatcatgaggaatggaaggaggagcaataagagactcttacattattacagcagctcaaacaagtctttgataccactgtatttacactgtgggtattataacttacctatgttgtacattttcctaatcctaaggaaaccagcttttccatgaatcttctgttcctcagtaaatcctccacatagctccctatttatacatttttgtctccatgttgccttactgtttaacagccattttgccttccctacccaaaccagagctatgtaaatattgccttttctgttctctttccatgtagcttttatctctcacagttaacctgggttccttatttctgtttatgtacaataagccttggctttcaagaagagactctggccctcagatcactaaacatccccagattttacatgtcccatgtaacctttgatggtgacctttgaagtattatatagtctatttttgaagctttgtaaaaattcatttagtcataaaattattaaaagctgaaaagatccagttatactttattgcatcttttttttttttttttttttgagacagagtctcactccttcacccaggctggagtgcagtggtgcaatctcagctcactgagatgcgtgtggtgtggtatggtgtgccaccacacctgggtaatttttttgtatttttggtagagatggggttttgccatattgcccaggctggtcttgaactcctgatgttaagtgatcagcccaccttggcctgccaaagtaagtatctgatagaagatacttttctctccataagatacagtaaagtaggccaggtgtggcagttcacacctctaatcccagcactttgggaggccaaggtgggtggatcacctgaggtcagaatttcaagaccagcctggcctggccaaaatggtgaaaccccgtctctactaaaaatacaaaaaaattagccaggcatggtagtacatgcctgaagtcctagctactcaggagactgaggcatgagagtcgcttgaacatgggaggcggaggttgcagtgagctgagattgtgccactgcactccaggctgggtgaaggagtgaaactgtctcaaaaaaaaaaaaaaatgcaataaagtataactaggtcttttcagcttttaataattttatgactaaatgattttttttacaaagcttcaaaaatagattgtataatacttcaaaggtcaccatcaagaaagtaaaaactggccaaacatgttggcttatgcctttaatccccaacactttgggaggccaggtcaggtggatcacttgagcccatgagtttgagatcagcctaggcaacaaggcaaaaccccatctctacaaaaaatagaaagttagtcgggtgtggtggtgtgcacctgtagtcccagctacttgggaggctgaggtgggaggatagattgaacccaggaggtcgaggctatagtgaaccatgattgcaccactgtactccagactgggtgacacagcaaagctctatctcaaaaaaaaaaaaaaaaaggaaaagaaaagaaatgaaatgaaaactatacctgataagggacttttatatatttgtacctagaatatataaaaaacccttacactcaaggtaaggtggcacacacctataacttcagctactcaggaggctgaggcacaaggattgcttgagcccaggagttcaagttcagcctgggcaacatagtgagacgcccatctctattaaaaaaaaaaaaaaagaggaagggggaagagttcttatatcttaataataaaaagacaacccaattaaaacatagacaacagatctaaataaacatttcttcaaaggagatatgcaaatgttcagtaaacacatgaaaagatgctcaacagcatgagtcatcagggaaattcaaatcaaaaccacagtgagatgccacttcacacccactatgatagctataataaaaaagacaaataataactagtgctgaagagcatgtggagaaattggaagccttataaatactgccagtgggaatgtaaaatggtatagcttttgtggaaaatagtctggcagttcctcaaaaagttaaatatagaggggctgggtgtggtggctcacacctataatcccagcacattgggaggctgaggtaggcaaatcacttgaggtcaggcgttcgagaccagtctggcaaacatggtaaaaccctgtctctactaaaaatacaaaaattatctgggcgtggtcgtgggtgcctgtaatcctagctactctggaggctgaggcaggagaattgcctgaacccgggaggcggacattgcagtgagccaagatcatgtcactgcactccagcctgggcgacagagcaatactccatctcaaaaaaaaaaaataaaaaagttaaatatagaattgctgtataacctagaaattccacttctagatacatacctaagataattgaagacatatatgcacacaaaaatttgcacataaatgttcataccagccttttttttttcttttttctttttttttttttctgagacagagtctcactctgtcgcccaggctggagtacagtggctcagtttccgctcactgcaacctccatctcctaggctcaagcgattctcctgcctcagcctccaaagtagctgggattctaggtgtgcaccaccacactcaagtaacttttttgtatatttggtagagacggggttttgccatattacccaggctggtcgtgaactcctgatctcaagtgatctgcccaccatggcctaccaaagtgctgggattacaggcgtgagccacctcacctggccatacccgtataatttataaccaaaaagtagaaacaaacaagtgtccatctactgataaatgaataatgtgatatatccatacaatggaatattatttggccatgaatgaattcaaggaatgaagtattgatacatgctataatatgaatgaaccttgaaaacattatgccaaatgaaataagccagatacaaaagggcacatattacatgacttacatgaaatgtccaaaatacacagatagtcagaataggcaaaatgaaataaaaataggcatagagatataaggtacattagcagtctccaggggtgggagtagggtgaatgggcagtgactgctaacaggtacaacatttcttcctggagtaatgagaatgttgtaaaattcactgtgatgatagttgcacaattatgaatatactgaattaaacctttgaatcatccacttaaaacgagcaatttatatgttaattttatctcaaaactatgcctcttcttgaatatactatatactgaaatgttttagatggtcagatgtctataattaaattataattaaattcaaaattctgttaagatcagctctgcttcaaaccaagattaaataggtgtaaaacacaagagacaaattggtcattaatgtcactttttttctttgtagcatagccttaccttagactcaaggccattaaatacttaataaatccaggaaaacaatatcaaatgaaataaaacagaagggatttatactgttgttttattagggaaagcataatacaattgcagcatatccatttgagcttcattcagctactatagacgcagtgcccatgattaaatttaaataaataaaattaagccgggagcagtggcctgggcctcttagtcccagctacttggaaggctgaggtgggagaatctcttgaggccaggagtttgacactgtagcacattatgatggtgcctgtgaatagccactgcactccagtctgggcaacatagtgagaccctcatctctaaaataagtaaatacataaaattaattaattgaaaattaaataatattaaaataagacaatagattatgcaagtaaaacataaaagctttagccacagagttatttccctaactcactctctggttttaagaggaagagtttgtaaaaatatttatatatcagtgattaaatcagcagcgttcctatagatctattaaccaagtatattgatactataatgtttataatcatatttatactctgattttcaaatattgaaataacattcactttctataataaattttattcagcaaaaatgccttttttttttgagacagagtcttgctctgtcggccaggctggagtgcagtggcacaatctcccaggaatctctgcctcccgggctcaagcagttctcctggctcagcctcccaagtagctgggattacaggtgtgtgccaccacgcctggctaatttttgtatttttagtagcaacgaggtttcaccatgttggccaggctggtcttgaactcctgacctgaggtaatccacccacctcagcctcccaaagtgctggaattataggcgtgagccactgtacccagccctaaaaagactcttaagattatatttaatttatttgaaatttttctccagtgtgatttggttttcaactaattcaactaaggtgctactggtgattaaaattagagtatttagttcctgacaacacaatatgaaagatagagattatcataataaggagagtaaattgtacatgtaggcattaaagaggagattcagaaaacagtacctctaatcattaggaaccctgaagggagtttaaaagttttgtttcatgtcttgttgttgatttcattcaatatttacttctcttttaatttctacatgcaggtttgactgtgcagatcgacagttccattctattcctgctacctggcaagctcttatggataatccatatgatgttaaagaacttattcctgaattcttctatttcccagagtttttggaaaatcaaaatcgtaagaaatagaggattaaaaatttgactagcaggtcccaatggaggagcctcaaaaatgtctttcaggacatttttgtaatatcctgtagattatttaagattcattctgtctgtggattacttagtgacagggctgaactaatgctatgagtcttaccttccagggaagtgctatagggaactaagccaaaggagtcaaatttgaatcagtaagagaatttatcagactacagtgtttactagggaagcaaaaatgaccatatgctatttcagctatatataccacttaggttaaaagtgtttgagttagataaggtgaggatttagactaaccatcagctgactacaggtctgttaaccaactccatgggcaaactcatgtctttatatatacagtttcactgaatacagccagtcaattttttttttttttttttttttgagacagggtctcgcttttcccttaggctggaatgcagtgctgtgatcactactcactgcagccttgacctcctgggctcaagtaatcctctcagctcagcctcctgagtagctaggactacaggtctgcaccaccatgcctgcaatttttttttttgtagagatggggtctcactttgttgtccaggctggtctcgaactcctggactcaagtgatccttccaccttggcctcccaaagtgctcggattacaggtgggagtcaccatgcccggccagcttcatttttgtgtcatagaaggtttctttcaaagtaagcatagtggcagatttgagtagttgcaacagatatgataacactcacaaagccaaaaatatttattctttgactttttataggaaaaatttggtaactcctgatttagagcatgcaagagtaggcaaattaaaatgacaggatataagttactgtaatatttgaaaatttatgttatgtttttgaagtagagaagtatggagttaaatattaatacctttttaaatgtccaaatcctttttctgtgaggtagttttacatttacttttaagtacaaataaggaaattagcaatatttttattattggtgttctttagggaggttccacagtattaaagggttattaccaacttttttccctgccctaacatgtaatgttagtgtttgacccttcatttattcagtacaattatttgtcatactgtggagaatatatccagggcttaatgtcactttgaccatgaactctggaacaagctgttggaggcagggcatcacagtaaggcagtcagaattggtgactttcagaaaatgaggtaaatctgttgtctgagtctgatcctaaactctcagtcagctattggactggattcttctaaagcagagtatctagaataggagggatgagcagactacatttggataaagaatttataaggtactctttaacaatttatatcagagttagttgctatctttagcaccattgtcctgatggcctccacttctagctatacattgcctctttgaaatgagccatttgggagaaagcaaatatatcaattagaatgcctttaagaataaaaaacttaaaaagcaaagaaaaacagaatgcctttaggaaaaaatttaataaaaccaactcaaaattgtgcaaacaaggaaattttagtgtttcccataataaaaatcctgaggtatggtagtttcagatagtttagcatcatcagcgccaactttttttctgtattttcactctgccattctgagtattttggctttggctagttcctctcatggtcacaaatgcctaacgcagttttaggcatcataggcagatccaacagtatcgcagaaataagtgaggctgttaatccattgtgtcctttcttaagagtgagaaactctttctcataagttctcctcactctccagaactgggtcatataccaacccctagaccagtcacctggaatgggcatgaaatatagggcagagatggacacttgaatgaaataaaggttctgctagcaaataaaaagagggaatgactatcaggtgggcaacgaataacatctgctacactgtgatgggtttaacataaaaccaaagaccctgtgcattctgtcattttatgacatttaaactcctctccaacttgtgatacactggtattttaaggcagcatactggtattttaaggccttcttttttgaagttcttttgtgttaacagtcccccttctcccctgccatgttgtgtaaacaaaaaaaccctcatatttggggaaattttatcaaaatgccatgttctaacctatgagcaaatctttattatgcaagtatctatttagaatagtggtatgtaaatattattcttccatcagacaaatataactcttccagtaggtgagcttaaggtatgagttacaccaaaaagctttaaggagctgtattttactattagagggactgtgtccctctcattattttaagtgtaagaagaaaacttaattttgcattttggtctgattgaaataagggttgtagctatagtttcccccactttttttgcttaacaacttaattcttactctaatttaccttataatagctaatttaaaactcgttatttttgtttttaaattaactggtatgtactccaatagataagaattttaaaagaaaaaatatgttttgcttaggaatgtgccctcattagtgtttgttttacttcgtttattataatctaaaatgatttgatacattttctttttacatgtcttagaatttaacttgggtcgtctacagatttccaaagaattagtaaatgatgtcattctcccgaaatgggctaaatcagctgaagatttcatctataaacataggaaagctttggtaagagttttgcatttagttatttgacagaataataagataaaagatgtgttttccagaggatgggataatctgacttagttatttttctagattaatttgtaatctattatatatgctgactttagaaagtacaatatagcaatttattttgaggatatgaatcttctgatataatgagactatagtatagtaccatgaataaatatatatatatatagcaaaatattaaacatttcagctctgtaaaatgtccatctgctgtgtatgtaaatattccagtcaccaagctggtgtagtttggtgttttacagttttcacatttatttcaaatctaataaggatgagtacatttttgttttctctgaaagatttcactaagcttctaaaagaaaggcagctaagccaagcacagtggctcacacctgtaatcctagcacttttggaggccaaggaggccaaggcctcacctgaggtcaggagttcggagatcaacctggccaacatggtgaaacctcatgtctactaaaaataaaaaaattagccaggcgtggtggcgcatgcctataatctcagctactcaggaggctgaggcaggagaatcgcttgaacccaggaggctgaggttgcagtgagctgagatcacgccgttgcattccagcccaggcgacagagcgagactgtctaaaaaaaaaaaaaaaaaaaaaaaaagaaacaaacaaaaaaaggcagctaaaccctaaatgccacttgaaaaaaaaggtgggcacagtggctcacgcctctaatcccagcactgtgggaggccaaggcgggcagatcacctgaggtcaggaatttgcaaccagcctggccaacatggcaaaaccccatctgtactaaaaatacaaaaattaggtgggtgtgttggcgggtgcctgtaatcccagctactcaggaggctgaggtaagataatctcttgaacccaggaggcggaggtgacaatgagctgagatcgcaccactgcactccagcctgggagacagagcgagaagccatctcaaaaataaataaataaataaagtattagtttttagttaaatttcctaatttggaattgaaggactagtgagggttagtttaacgttggttattgtgttgctatcttgcagatgatattgatggctccacttttccccacagtagctcactttattctttacctaaactgaaatgttggaggactctgaaaataattaagccagtacttggaaacattttctatcattatatatttataaaataagtatatatttataaaattcagaatttgattataatatttgtaagccttaaccctatgcatgaataaggaatttagaaaaaatttagaaaagcaaaaatgagtatagccaagtgtgggtggtgtgtaccggtagtcccagctacttgggaggctgaagtgagaggatcacttgagcccaggagtttgagaccagcctgggcaatatagcaagaccctgtatttaaaaaaaaaaaaaaaaagtttatttgggaatgaatgatgaattgcagtctgataatacctgtgccctggtgaaccattagggaccagagatgtacccaggaaggcaaggatttttaaaggtaaagtgaggaagtttacatgagttgttttgaaacaattatccttgaccacacggattaataacaaggatggcattagtccaaggttgaacaggcagttgctgggcagacatcctcgcagaagtattcttggtgtatggttgtggttttcagagtgtctttgtcatagtctttattgtaggcatgtaggcatgtatgcataagagctcctccttgatggactctccactgaattttgttaggttttggcattccatttttatccatacagctttcacaaccctattaataagatattagaattatatatttcaattatgtattactgagtaacaaactgttccaaaattcagtggcttaaaagtatagccattttaagggagagatagcattaggagaaatacctaatgtagatgacggattgatgggtgcagcaaaccaccatggcatgtgtatacctacataacaaacctgcatgttctgcacgtgtatcccagaacttaaaagtataacaataaaaagaaagtatagccatttaatcatcatctcccacagttcagtgggttggctggcctcaactgaggaattctgctggtcttgcttgaggttctcatgcagttagtagcagtcatatggcagctgggattggagtcatctgaaagctgcatcgaaacggtaggatgctagcttttctccctctccatgtaatgtcaggatatctcctctccaactgggtagtcagactcctcacctggcagctaagtgctccccaaaagtagaagcttccactctttcttcatagcataacttctgccactttgtaatgtttaagcagtaacagtatcaatgccagattgaagaggagggaaactgagctccatctttcagtgctaacagtgagaaagaatttgtagctatcttaaatcaacatgtattctgccctctggtcacaaattattttcctcctacatgcaaaatatattcacttcctctcaagacacccttcccccacaactcttatctcattagggaaggaattggcaaattgtttctgtaaagggacagatagtaaatcttcgttggtcataagatctatgtcacaggtactcagttctgccattgtactgcaaaaacaaatggatgtggctgtgttctactactactctacaaatctggcagcaactcagatttgacccacagacagtagtttgctattctgcattaaggcttgaggcctaaaattcagtatctcattatctaagtcaagtctgtgtgtggatgaaactactcagatgtggctcctcttggatctgaagcctgaactaaagagagaagttatttgcccccacatgacaacagtggtatgaaaggataagagaacttataaacagacactcccattcaaaaggaggagaaaagcaggaggctcctagcagtcacaaatacaaatactgttttatagcaattcagaattccagtaaggacatgctctcagatcttctgttagggtccagtcctgtctcccgagaggggttctcagtggctcttggttctacctttgagcttttggctccccactaagtcattctttttattccataaaaataaataaataaataaataaataataaaactttgtttacaggagtatctttgtcagcctctttcctaaccacagtgaattgaaggccaaaggtctctcttcttttttaaacagtttctctcttttactctaaactagtctaattccatttaaaactttataggtttcttatgtgtcagctctattggacaaaagccattcaacattaccaaacagtcccttctctactttgggctggatgggtggctactatggaaaaatgctcttaagattcctagacactctattttctagttgagtgggtctgtgggacacaaccttaaatctttctgaggtctcaacagattattttacagccaaacccttgaactaaacttttatccaagaccatattttattggtgacattctgatttgatagttgccttaggcaatttctcattttgagagtctttgccctctagagatcccgggactgagaaatgtcccccggctggagtgcagtgacattatcacaactcactgcagccgtgtcctcctgggctcaggtgatcctcccacctcagcctcctgagtagctgggactgtaggtgcaataccaccattcccagctaattttttgtagagagtgggtttcgccatgttgcccaggctggtcttgaattcctgggctcaagcgatccacctgctttggcctcccaaagtgctggggtaacagacatgagccaccatgcctggctcttgcaatggtttttttttttttttttttttgaatccagcaatatctggcttttttatattttctttaaattgtgcttacaaatcaaatagttcacttttggctgggtgcagtggcccacacctgtaatcccagcactttgggaggccaaggcgggtggatcacctgaggtcaggagttcaagaccagcctggccaacatggtaaaaccccatcgctactaaaaatacaaaaaattagctgggcgtggtggcaggcgcctgtaatcccagctacttgggaggctgaggcaggagaatctcttgaacccatgggaggtggaggttacagtgagccaagatcgtgccactgcactccaacctcagcgacagagcgagagacttcgtcccaaaaaaaaaaaaatcaaatagttcactttttaaccgatcttactgctctcacactttatcataggcatctgaaagaagccaaatggcactttaaaatgtactgtttggaagtctgtacacccaaattcatgagttcattctttctttcctgtaactgaaacatgagtcccattttttcctgtctctaataacaatttcctcactgtctttcaaattatcactagtaatttacaggaggtctctacctgccaccctggcctcctcttagtaagtggttattgtgagggagagaatgatttgcagccattttttccacctaagtgtggtttcattgtttccttaaattgatatttttttttcttgaattgaatttctagacaactatttcaatggaaattttgccacagagatgcattccatatctatcttttagctcttttgctgttgtttttgggctgttataagcatatttgtgttttattcacctattaggaaatgcatatgttaatattaataaatatatctacattatagtagacaggaatagttaatatatgtagtatatattgaataaatgcttgccattattttgagataattttattttgctgccagaaagatttgtgtgtggaaatgtttcatttgtccttacttttttaaagaactgaatttacaatgtagttggaagatatctctatattaattattaaatttattctttttctaggagtctgaatatgtttcagctcatcttcatgaatggatagatctgatctttggctataaacagaggggaccagctgcagtagaggcactcaacgttttctattattgtagttatgaaggtataaatctatacactttttctcttgctttaccttgatagaaactgttgtttaatatatgtttacagttatttgaagcctatttaatatcagaaagactacattttaaaaacatctttttacttgaaagattaagagactgctgctttttttgtaatagtagttaagtgtatatatgccaatctaattataaatgtcacttattaacatcataaaagtttttgatctctaacatatttgtcctatccagttgagtcaaacattaaatattcagtattaaacagtagcagattttgaaacaaggcctttgaagttacaaataacagattcttcaaatgatacatatgatggcattatttagctcagaatcaagaatatcttctgatggccttaaaatgatttttaaaaagtagttctttactaatccttaagaagactaatagttctaaagattgtgaatagtgtgaagttatgagagacttttagtaaatgagcatatttttgctataccggatccattcaggtaataggtttgtaaggagaaagtattgcatggctgttagaagcttggacttacctagtttagccaattactagtcgtgtaacaatccatattaggtgtggctgagtataatcagttaaccagaatattaccttttgaaacctttgtttcaagcaataacttaaagcagtatttttgtgtagttattactcttatttgagtttggctatcataaccaaaacaattaggtgtactctgagtataatttgtatttttgcaaaagaaatttttatttatttatttttttatcttgtgactgggtcttgctctgtcacccaggctagagtgcagtggcataatcatagttgagtgcaacctggaactcctggggtcaaccagcccctgctgcctcagcctcctgagtagctgggaactgcaggcataccaccacacccagctaatttttaaaattttttagagagatgaagtctcactttgttgtccaggctggtttcaaactccaggtctcaagcagtcctcccgcctcagcctcccaaagtgctgggattacaggcgtgacccaccacccctggcccaatagaaaccttcatagaatatcatttaactttcaattgcttaaaatattttagctaatttttatatatatttaatgtttgatgcgttgctgatttttttgaattaccttttcacaatgttgtaaattgaagaatggaataatattttattgaaactataccaatgaggtcagggtggtggctcacgcctgtaatcccagcactttgggaggctggggcaggcagatcacctgaggtcagaagttcaagaccagcctggccaacatagtgaaaccccgtctctactaaaagtacaaaaattatctgggcgtggtggcacggacctgtagtcccagctactcaggaggctgagggaggagaattgtttgaacccaggaggtggaggttgcagtgagtcgagatcataccactgcactccagcctgggcaacagagcaagactctgtctcaaaaaaaaaaaaaaagatgtgtgtacacacacacacacacacacacacacacacacacacacacacacacacaccaatgagcctgatacattaatcagtgatgtggcttgctgatttgttttcactctatagtaagttgacttcttctggttttaggagctgtggatctggatgccttaacagatgagaaagaaagaaaagccttagaagggatgattaataattttgggcaaacaccctgtcaattattaaaggtaagtcaacaacttaagaagtagatttaagtcaacttaagaagtagatttaagtacataacaaaatattgcagtcaagatccatgtatatagccagttactctcagtcacagaaagatttctgtttgctcagaaagtcttatattatttccaagaggaaaaactgagtacctattagggtatgccattaaaactgtcctcatgctgggactcattccacatgtaaaacttctaatagctaacatctgcccaaaaaggcacttgctttccagagcccaaacccagtcttaagaatcaaattgctctcggctttcggctcggaggaggccaaggtgcaactttcttcggtcgtcccgaatccgggttcatccaacaccagccgcctccaccatgccgccgaagttcgaccccaacgagatcaaagtcgtatacctgaggtgcaccggaggtgaagtcggtgccacttctgccctggcccccaagatcggccccctgggtctgtctccaaaaaaggttggtgatgacattgccaaggcaacgggtgactggaagggcctgaggattacagtgaaactgaccattcagaacagacaggcccagattgaggtggtgccttctgcctctgccctgatcatcaaagccctcaaggaaccaccaagagacagaaagaaacagaaaaacattaaacacagtgggaatatcacttttgatgagatcgtcaacattgttcgacagatgcggcaccgatccttagccagagaactctctggaaccattaaagagatcctggggactgcccagtctgtgggctgtaatgttgatggccgccatcctcatgacatcatcgatgacatcaacagtggtgctgtggaatgcccagccagttaagcacaaaggaaaatatttcaataaaggatcatttgacaactgaaaaaaaaaaaaaaaagaatcaaattatagaatatttaaaatgtagaatcaaattattaaatattactacatatatttctttccctatactggtatctgaaattaaatcattatcttcctgatgacacacaggtttagattaatggaaattaatctaatggtagttttcaaagatgtcttgatctttttcagtatatgaatttagtgatgtagaatgtacaaaaaaatatatcatttattaactagatatgttcttaagcaatcactgtgtttgttaggtactttacctaatcttcatagtaaaaattcagctatcctcattttttaggagttaaagccaagcctcacagaaggtaatacctagcctataatgcctttgagaaattaaatactttttctatgtttacacaacaagaaagtgactaggattatatgcctgaccatctaactccaaagcctttctagcatgccatgtttcctctgaatgagtagttgtaagcccccgttaaactagatctcttaacatgttcttatgggcctttatttgctacctaattaggacactttctgccttaggctatatatttatccatttacctcagtacattataaatacattaaaggcagcaactttctcttaatcatctttgtatcactcttgaatacagtattgaattgaaatcgccacagctattacaacagtagtgtatctaagctctaacttatagatgtacttctgtcaatacagtaattgggctaagctttgtaatttttactgttccttagcaacagtttgctcggaacctccaacattggtttttacagaatagtcatatgtgaagtcaatgctttatcccttaccttctggtacagtcagaaggcgaaagtaacagactaaaacagaatgcttcacagggctttgaaatagatgctatcatattttcacacctgctttacctttctttttgttttacaagtggtgctaattagtttttattgtgatgaaaatgatacaaaaatcagcctttgatttgaaataaagtgaataatatttattaaaagataattttttttttttttttgagagggagttttgcccttgttgcccagtctggagtacaatggcacaatctcgggttactccaacctctgcctcctgggttcaagcgattctcctgcctcagcctcccaagtagctgggattacagaggcccgccaccacacctggctaattttttgtatttttagtagagacggggttttgccatgttgggcaggctggtcttgaactcctgacctcaggtgatctgcctgcctcagcctcccaaaatgctgggattacaggtgtgagccaccgcacccgatctaaaagctaaatattttagtacttacagctttcacatctattgcctataatcaatatttttttgtagagatgtaagaatttactttagatagaattctgttttgccttttaactgtgcctttgaaatgttcattttacttgccatttatttcatatttatagatgatactgttctgtgtttctgacatgaaagttgaggaagaacaaaatttacttgaaaagtatgcagcagtacctataatttgattctgacagtattgactttttttctttctttcttttttttttttttttttttttttttgagatggagtcttactctgtcacccaggctggagtgcagtggcacgatcttggctcactgcaacttccatcttgtgggttcaagcgattctcctacctcagcctctcaagtagctgggactataggtgcacaccactacgcctgaccaatttttgtatttttagtagatacagggtttcaccatgttagccagtatggtcttgaacttctgacctcaagtgatccgcccacctcagcctcccgaagtgctaggatttcaggtgtgagccagcacgcccagccagtgttgacattttgatcttgtcaaggaattaaagattcatccaaattatacattctgaattttgaatactacatttaattttaccaagcatctaacgtgtaagatactagtctagtatggaaatccaaaaatgaataaggcttctctagctttaaggcacttataacctagctggggaagacagaccataaacaactatatgtaatccaatatagaaagaaataaattataattaaaatataaattatttgccaaggaaaaataataaaagagaataatacattctgacttgaaaatttaggagagatatcagtaagaaaaactttaaagtagaagtggggtttccaaagaaatgaaaaaagtagtatctctgctaagagaatagtctgagccaacacctataattgtcaacaatgcatggtatgtaattcattgtagctagagcctagtgtatatgaaggaacatagtgagagattaataacatagatatggaattgtttttccttaaaattattttgaaggaaccacaccctccaagattatcagcagaagaagcagtgcagaagccaaccaaaatagacacttcaaccctaaacctgtttcaacaccttcctgaactcaagtcattttttatagaggtaatatcctacttggtaatatcaaaaagagttttctctaaattctgtacattttaaagttcttttattatttaatgggaagtaaggattataatatttaattcaagatagtaaattatactgtaataatctgttgttggatttttaaaacatttttattggaagcttttgtttgctgctgagtggtagtctgaactgtttttcttggctttctttcatctacttcacattttcctgacgaagaagaataaataatttgacttaaaatgcttcttgtgacaatcgagatgatatgtagatggagataataatttaatagctcttaattataatgtctgctcatatataaaatagatcctaataagtccattgttaattgatagaatgagtagtctagtaaaacaggagtagttaatggtgtaattgaaagagtttaaataaaaaattcaaatgtttaaatatacatattaaattgagtaattcagaatgtgattataaaatgcattcatacctatgaatgtggttaggacagatagcattaacccttcacaaaaagaaaattgaaaataaaaagttactaagattagtttgaaaatatacattgaacagtctctgcaatacagcagaggttggtaaactctttcttgtctcaaataataacttatttgaaaagtatgcagcagtgagataggtctaactggtaaatattttgtgctttgcaggccaaaaggcaaactcaaagatattctgtagatacatatataaccacttaaaatgtaatcatctaaaaatataaaacccatccttagctcacccaccgcctacaaaacaggtggtgggctggctttgtcccacaggctgtagtttgtaaaaccctgcattgcaatatcactgcagcgtgtttctcagattcaataccatgggaaaatgaattatcaaaaaatataattttttgataatgtagtgtaaaaaatgtttatgagttttataacagttaaagctttggccgggcgcagtggctcacgcctgtaatcccagcactttgggaggccgagaccggcagatcacgaggtcaggagattgagaccatcctggctaacatggtgaaaccccgtctctactaaaaaatataaaaaattagcagggcatggtggtggacgcctgtagtcccagctactcggaaggctgaggcaggagaatggcatccaggaggcagagcttgcagtgagccgagatcacgccactgcactcagagcgagactccatctcaaaaaaaaaaaaacagttaaagctttataatacattttactcaaatgaacaatattgtagtaagcatcactgtattttttaattgatgtaataattaaacagttttatggggtacaccactgtattttggtacatgctttcacgtgtttgtgaaagcacttcaaaattaatctgtcactcttttcctaaatccatgtttactgaaatagttatttagtgttgcaatacaaactctacaaacttggttgtttccaaaagtatctaagttagttgcatagaactcagaacacaaaaaaacaatgctcagaaattatgactaattcccaggatgtgttgggagtctccaagactacccccaggttcagtgatttgccagaaagactcacggaatttaacatgtagttgtagtcatggctaagatttattacagtgaaaggatacaaagcaacatcagcaaagggaaaaggcacatggtgtgcagtccaggggaagccaggcacaagtgtccaagagacctctcctagtggagtcacataagatctacttaattctttcagtaatgaaatgtggaaacacatttttttgtcgtcagagaagctcattagagacccagtgcccaaggtttttattggaggctggtcgcgtacacacccctctgactagcacataccaaaattccaaactccagaagaaaaacaagtgtttagcataaaccatactatttgcacaaacactctaggtgtagtgagccacccttgtcattgagggaaagttttatgtcagtgtaaggatgaactgttcgccagccaagtcccagatgccaaccaaaggccagtcttgcaagtaggcctttctgtaacaatgatggcagtctcaggcctgctatgttaactctttactgcatgtaaaacaacacaagaccctatttgacccataatctgatggacatgcaatactatatttcttctataatgccaatagaactattttcatcttatctaatcatttgtgacttttcttgtaatatagtacattccaagttccatctgcaggtgcagcaacacatctgcccttctctgtacctaccatgtcacatagtagctttctccaggacacattcagtatctggatcagtataaagaacacaatagatttccttgggtaccaataacttgttaatcccttttcatcctcgtaagaggtatttccccatgtattaatatgaaaagagaaggccttttgtaggtcatctcttcataggtgttcaaattgtgaagaaagtagagatagtagtgaaagcaagggcttaataaatgggtttttttcaggtaccattttcattttgccttgttcaaatgcaagtcattcttctctggattaattcacaacgtaaagagaaaagataatcaccaactttttaaaattttataaattataatgaattttataatttgttacttagtccctattaagttcttagaacaacacctgatacatagtacatacccaataatgttatcatttacctagtaaatattaggtatcacttgtgaacaactgtcacatcagggaactgaattcaaattattgttctctttcacattgttataagataatggcagatgttttctgaacgctgtctttattttctggtcctactgtggctttcaggaagtaccctagttaatgggttagaagtgttttttaaaagttagacccaaaaggaaatttctataaattatgaccaattttctcatttgacttatttgagaaacatgttcttatatgatccgtattttctactttatatgtatgtcagtataacttaggatagatcctaaatcattggctgttttaaattattgctgctctttgaaatctacatctcttttttaaaagcagaatagttgaatagaaggtgatgggtttcagaaatttcaagtatgccatatatacatggtatataattcctttccttcattttaaattaattgattagatgtttcaagagagtaaaatgatgtatcacaggattcatccttatttaaagagacggttttcagtaatttgtacctaataaagatgagcagaaccagccactaaacctcttttattttataggggattagtgatggtattccactattaaaggccaccatccccaaaaatcagtatcgttcttttatgtctcaaggcagccctgagttactggtaagttgatttttacctttttcacactgctatgcctatattcattacaacttagaaaaaaagaggaaataaatattttttaaaagccactttttggctgtgcatggtggttcatgcctgtaatcccagcgctttgggaggttgagacaagcagattgcttgagcccaggagttcaagactagcctgggcaacatttgctcagaaaataaaatctgaaaagatatataaaaataggctgggcacagtggcccacgtccgtaatcccagcactttgggaggccaaggcaggtggatcacttgaggtcagaagttcaagaccagcttgggcaacatggtgaaaccctgtctctactaaaaatacaaaaaattagaaaggcgtggaggcaggtgcctgtaattccagctacttgggaggctgaggcaggagaatcacttgaatccaggaggtggaggttgcagtgagccaagatcgcgccactgcactccagcctgggtgacaagagcgagactccttctaaataaaaataaataaataaataaaaagatacacaaaaatagtagtagtactttttgagcagtggcaatcttgtgaatttcaatccttatatatatatttttttttcttttctttttttttttttttttgagacagagtctcactctgtcacccaggctggagagccaatcacagctcactgcagccttgacctcctgggctcaggtgacccttccacctcggcctcctgagtagctgggactacagatacacaccaccatggccagctaatttttgtattttttgtagagatcaggttttgccatgttgcccaggttggtctcaaactcctgagctcaagtgatcctcccacctgagcctcacaaagtgcctgcgttttttaaagttaccagaatttcgtttgtcgggggttgcttgttaacttttataatcaagaagataaaagcttttcattttgaagagaggagaacttactatgactgtcactacaggcagaccttaacagttcattgcattcattgtaaattatccttctggtttatgttctaaatgatatatattatatttttatggtaagactggtccctgaatttcttccatctgccagctgataagtgctaataaactttgagaaatcatgagaaaaaataatcttcctaaagaaagataaattgggctgagcgcagtggctcacacctgtaatcccagaacttgggaggctgtgggtggatttcttgagcttaggagttcgagaccagcctgggcaacatggcaaaaccccatctccactaaaaatacaaaaaattagccaggcatggtggtgcatgcttgtggtcccagctactcaagaggctgaggtcagaggattgcttgcgcccgggaggttgtagtgagctgagatcatgccactgcactccagcctgggtgacagagcaagactctatctcaaaaaaaaaaaaaaaaattggacaagttttcttacaataagataaacaaggccaggtgtggtgactcacgcctgtcatcctaatgctttgggaggccgaggtgggaggctcacttaagcccgggagttggagactagcttgggcaacatggtgaaaccatgtctctacaaaaaatacaaagaatacaaaaattagccaggcatggtggcgcatgcctgaaggttgcaatgagctgagatcatgtcactgtgctccagcctgggcaacagagtgaaaccctggctccaaaaataaaagataaaaaaagagctttttctgtttgagttatcttaagatgtgcttaatgagtttcaggtttgaagtacacagtctcacagtgttccctaagtgataaatgccaatgtcatgtgagcatctggttattctgggctgctttccttaatatttcatttaatttgagtcttcatatgttcttttccagataacaataagcatgaattatgttattggaacccatggatggttgccttatgacagaaacatttctaattactttacattcatcaaggatcaaactgtgacaaatccaaagtaagtaaatgaatatgtaaagcaaaatagctataccagataccttattgccaggaaaaaaactagattaattgattcatttattctgaaagaaatattttttttttttttttttgagacagagtcttgctctgcggtgcagtggcgcaatccccactcactgaaacctctgcctcccgagctcaagggattatctggctaatttttgttgttagtagaaattgagtttcaccatgttggccaggctggtctcaaacccttgacctcaagtgatccgcccacctcagcctccccaagtgctgggattataggccgcctggccctgaaagtaatgttttgagatccagattatctcttcttccctccttcctccctccattccctccccaaccttcccttatttttaagttatgtcctgaatttatattggtttaaatacaaaacttagtttccataatatgagttatagaaatacaattacattaggaataatagacttccttgtaattttattctactttattatgtaaaaataagacctatgtattttaatctccaaaagttatgttctcacttaaagtggtgtttcccttacactgaattgtcctgtttgtttgcttatatttttttctagttaaatcacattcatggctgggcacaatggctcacgcctgtaatcccaaaacttgggaagctgaggcaggcggaccacctgaggtcagaagttcaagaccagcctggccaacatggcaaaaccccgtctctactaaaaatacaaaaattggccgggtgtggtggctcacacctgtaatcccagcactttgggaggcagaggcaggcggatcacgaggtcaggagatcgagaccatcttggctaacacagtgaaaccccatctctactaaaaatacaaaaaaattagccaggcatggtggcaggcgcctgtagtcccagctactagggaggctgaggcaggagaatggtgtgaacctgggaggcagagcttgcagtgagccgagataacgccactgcactccagcctgggcaacagagcaagactccaactcaaaaaaataaaataaaaataaaaatacaaaaattagccaggcatggtagtgggaacctgtaatccaagctactcggggggctgaggcaggagaatcgcttgaacccaggagacagaggttgcagtgagccgagattgcgccactgcacttcagcctggacgacagagcaagactccacctcaaaaaaactaaaattaaaataaaattcaaaaatcacactccatgttgaggatcaaattacaccatatatttgaaaactatttaaaatgatataattgttatcactgtatctttgtcttcctcaactagaatacaacttcatgagattaaggaaaatgttttttttcctttcttatcccacatagtactgttatgttttgcaagaagcatattctcagcaaattaatattgaacaataaagttttatagctagagtatgagaattagccctcattttctatatacacactgagttgcaatcacttgtctttctgcagaatctggattggctaagctcacaggtattgcacttggaagctgataaaaccagcatgcttgctttggttcaaatggagaacagtcatcataagtgttgttagatacacacttatctgcctgatttatctcctatgcatcaccttgtgtaggacatccctggtttaagtttatttctgatattcctggtcctggcatatcctgtcttgtctttaaactttaaggctgtcatttacaaaattgccaattttattaaattgtctttgaaatccaagatttaagctttcttcacaccttcactgatttcacctttttttgtttaccacttgagattgttatgtatattcttaatttatgaaaaatattacagtgagataacatgttttctgaaagtctatcgtttattaatagacatttcaaataggacatttgggactaattttttatttcttttttagagaggtttaaaaagaatagttcacatcagtatacgtgatcttgtaaggaaaagtctgatatttaattgtgtttacagaactcagcgcagtataaatggttcttttgctcccgggctagagatcacttctaagctatttgtagtatcacatgatgcaaagttgctcttcagtgctggatactgggataatagcattcaagtgatgtcacttacaaaaggcaaaattatctcacacatcatccggcatatgggtaagcattagctttttttccaaaaatgctcaaaaattttctttttttcttaagtataaaagtagtacgtgctctttgtaaagagcattaaattttacctttgaagctgagtgaacttttttattgtgtaggattataaatatatactttctataggagtgtctcatgtattttgggtataataaagcaccacataaattaaatacatcttcatagtatctggaaaatgttaggctaagttgtttttttttaatgaatgataaaagtaagaattttaagacaaaatggtaataaaatctgctgtcattagataagacatcaactgctctattactttgttaacagttaaacatgagagtgatgaaattgttgaatgtagttttaacttgctacttcttagtgtattagtcttcaatataagaataaaacattgagtaggtttttttctaataaacctgttagggaaggaaaatggagtctgctgctaattctgtaccagtcaatcctaagataacacttacgtctgcagtttaggaaaaatatatttgtattgtgaatttatagtatagtatgtgcagtttttctaaggacatatattctataggattacaattcccaatgggagtagaaggtgaatggggatgagaaagcaaagtagcatatgaaaattaactggggatctatctcaaactatctaacctcctcccaagattgtggtagtcattccccacactgcatgtcgacttctcatgctcagagaagggggatttcaaagaaagctctccgaggtgattttgacactgctgctttcctgtgtctctcttccccaatgcttttccagtaccatgtctacattcctccctgttggcataactgatttaggaatagtttgaacattaacaaaaattgctcttaaagttctattttagcaaaacgaggcatctcattttatttaattccttttcttacagatattgtgacttgcttagctacagattactgtggaatacatttgatttctggttccagagatactacatgtatgatatggcaaataacacaacaggtagtcacacatttaaatgttcttgaattaggtcagagattcaccctgagaatactagcaaaatgttctactaggacatcgaattgttttctggcagtgactgagctcctttgtattctttttacccacattttgtcctgttcaaatcaccacattttttcctaggtttactgtctgattcattaccttattccctattgctttccaaagattcttccttcttacctttcctaggaaaacgggaattattttattgtcttttagcatagtaacatttctgctttctttcttgtgggactactagaaatgatagatttatagttttcatcaacctgattgcattctcataataatattggtccaggaagtatcatttttattgaatagcttctgttttcttttcttttttttttgagatggcatgatctcggctcactgcaacctccgcctcccgggttcaagcgattctcctgcctcagcctcccatgtaactgggattacaggcacgtgccaccatgcctggctattttttttttattgtattttttgtattttttgtatttttgtatttttagcagaaatggggtttcgccatgttggccaggctggtcttgaactcctgaccttcagtgatccacctgccttggcctcccaaagtgctgggattataggtatgagccactgtgcccggtcagcttctgtgttttctgcattgtcttaacaggctttctcccactccaaatttataaaaagtatctagaaattttcttccatttaaaaaacccagctgagcgtgggacatgcttgtggtcctggtgggaggctgaggtggaaggattgcttgagccagggaagcagaggctgcaatgagctgagattctgccactgcactccagcccgggtgactgagcaagatcctatctcaaaaaaaattgttttcttctaattttttttgttttcttatattacaatctttaatttcttggtaatttatttatctacattggataaggctttgtttacttctgaataggaagcattacacttaaagtgtaatgttctcagatagtcttatataggtatttattcttacatatgaacttatgttttagccataccctcttttgttttttgtgttttttttgttattttttgtttttttgagatggagtcttgctctgtcctgagcccagctagagtgcagtggcgcaagcttggctcactgcaacctccacctcctgggttcaagtgattctcctgcctcagtctcctgagtagctgggactacaagcgcgtgccaccatgcccaactaatttttgtatttttagtagagacggggtttcaccatcttctccaggacggtctcgaactcttgacctcgtgatctgcctgccttggcctcccaaagtgctgggattacaggtgtgagccaccgcacccggccccataccctcttttttttaaaaaaaaaaaacaactccattttagtcttactgaaattgtatttaatttatatgttaatttggtttgggggttttttggttttttttttttttttttgaggcagggtctcagtctgtcgtccatgctggagtgcagtggcagtggcacaatcatggctcactgcagccttgacctcccaggctcaagcaatccttgcttctcaacctcccaagtagctgggactccaggcatgcaccaccacgcctggctagtttttgtgtttttagtagagagaaaatgattgtctctgccatgttacccaggctggtctcgaactcctaggctcaagcgttctgcccaccttggcctcccaataatttggcatatttttatagttatttatttacagaaataggaagtgtcttttcatgtttgtttcaggtcctttttatgtcctttgataaaatttctttctttttcatttagatctgataccttgtgatacttacttcaaattatcatgttttttattactatttttagtggggttttaaaaatcatttttgtgtctgattattgttaatataaagaaaagctatatagtgatttgactgatttctgtacaattatatcgaattactttgccaaatcctcttatcaactctcatggttattagtatttcttggattttctgaaaataaggtagataatacaatcatgtgatctgaaaataaaagtaatttgctttatcttttctaatatactaattatttcattttcttatattattagctaatacaataaggtaagcaaaattatagtgagcatccccgccttatatctaattttgatgaaaatgtcttcccaatgttaccatttagtatagtgtttgctgttaggtttcactagttgtgtttttcacatttaagtatttagcttacttctattatttttttcttttggtaactttatagttttaatgaaatttcaaacttgtaaaaaatttgcaaaaatagtatattttgtatcatgtgtcttagcagtctcttttagtatctccctcttacagcatcttattttttttaaccatttaaaagtttgagatatcatgttcctttacccctaaataggtcagtgtgtattttctgagaacaaagacaatcttgtacataaacccagtgaagttaccaaaatcagaatgcttaacatttatacaataccattagctaatccacagtccatgttctaattttgtatttccaataatgttctttacagctgtttttcccagtttatcttatttgtaatttttctctttttcttgatgtaatgtattatgttgagaactttcctaggtttgcaccatccttgaatttttataataaacccacatagtttatggtatattgttattacactttactgatgtatcttattagctagtactttaatgatttctctactcttaagtaagatagatctttttgttctgtctttatcatgtttagtatggggatatgcaatctttaccaaataaatttaggaagggctcctctttctcttgacttggaattgcttccataatataggaattacctgagttttaaaagttaaatatagtgcactacgcactcagactgatactcacagggaaagacaaatttgtcacaggtagcagagtgtcaaggggaattaatgcacaccacatggaacaggtggaaggtgtgggcagagttgtctaggataatcacaaatacaaatagcaactattcaaataaaacaaataacatacaactatgtgtatgctaaagacaaagcacgctaaagacatgaagaaagagtcttctggaagatgactcagagagcaattttttgcaatacaattgtgttattaggaaaacataagaatggcagttcaataaaatggaagatcaaacatgaaatgataaaatagcattataagaagaaaacgaaggttgcagaagaatcaagttgagattaaaaccagtaccattacatactccataaatatatatacctactgtgtaccacaaatgttttttcaaagggctgcagccaagacatatttaaaaataccattacaaacacaaataaacctgaagcagaaactacaagaaagaaagcatgtctctccctctccctctccctctctccctctgtccctttccctctccctctctccctctcccctctttccaccgtcttcctctgatgccgagccaaagctggactgtactgctgccatctcagctcactgcaacctccctgcctgattctcctgcctcagcctgccgagtgcctgcaattgcaggcgcgcgccgccacgcctgactggttttcgtattttttgggtggagaacacggggtttcgctgtgttggccgggctggtctccagctcctgaccgcgagtgatccgccagcctcggcctcccgaggtgccgggattgcagacggagtctccttcactcagtgctcaatggtgcccaggctggagtgcagtggcatgatctcggctcggtacaacatccacctcccagcagcctgccttggcctcccaaagtgccgagattgcagcctctgcccggccgccaccccgtctgggaagtgaggagggtctctgcctggccgcccatcatctaggatgtgaggagcccttctgcctggctgcccagtctggaaagtgaggagcgtctctgcccggccgccatcccaactaggaagtgaggagcgcctcttcccggccgccatcccatctaggaagtgaggagcgtctctgtccggccgcccatcatctgagatgtggggagcgcctctgccctgtcgccccgtccgggatgtgaggagcgtctctgcccggccgccccgtctgagaagtgaggagaccctctgcctggcaaccgccctgtctgagaagtgaggagcccctccgcccggcagccgccccgtctgagaagtgaggagcccctccgcctggcagccaccccatctgggaagtgaagagcatctccgcccggcagccaccccgtccaggagggaggtgggggggtcagccccccgcccggccagccgccccctccgggaggtgaggggcgcctctgcccggccgcccctactgggaagtgaggagcccctctgcccggccaccaccccgtctgggaggtgtgcccaacagctcattgagaacgggccatgatgacaatggcggttttgtggaatagaaaggggggaaaggtggggaaaagattgagaaatcggatggttgccgtgtctgtgttagaaagaggtagacatgggagacttttcattttgttctgtactaagaaaaattcttctgccttgggatcctgttgatctgtgaccttacccccaaccctgtgctctctgaaacatgcgctgtgtccactcagggttaaatggattaagggcggtgcaagatgtgctttgttaaacagatgcttgaaggcagcatgctcgttaagagtcatcaccactccctaatctcaagtacccagggacacaaacactgcggaaggccgcagggtcctctgcaaagaaactacaagaaagagatttgatgtggctgcaaatcaaattagtggcctggaaaaaaagatgtaatcaaagtgaatgccaataaaaaggtgactttaaagcagttagagaaagaatgataactaaaaatcaaagacagtcagcataaagataattgatgtccctgaagcagcgatcccaataaatggaaaaattattcagccggacatggtggccaatacctataatcccagcactttggaaggctgaggcggaaggattacctgagtcccagagttcaagaccagcctgggcaacatggcaagaccctcatctctacaaaaaaatgttaaaaattagccaggcatggtggtacatgcctgtggtcccagctactcagggaggctaaggtgggaggattacgtgagtccaggaggtcgaggctacagtgagccatgttcatgccaccgcactccagcctgggcaacagaatgagagaccctgtctcaaaaaaataaggttattcagaaatataacacaaaaagtttatttgaagttaaggaataataaatctgtagattaaaaggggaaataacatacttggaaaaattaacccaagactgtcaacattgcaaaaatttatgttaaggttttgagcttagttaagtttttgagatggagaataattcagaaatccaagtagaaatgtaagaatgagtactattatgaatagactcagtggttgtaactagttgcaatgttagtttgtgattagaaggtttaaatgcaatataaaccttgtgaaaaacaggaaacaagaaaccacctttacctttgcttttctcttgtattattagggaggtgttcctgtgggcttagcatctaaaccttttcagattctttatggacacaccaacgaggtactgagtgtcggcatcagcactgagctagacatggcagtgtcaggatcaagggtaagatttcacctttaagaaatactatttattttgtctacaaatttattaccaacacttataactaaaaagtttttcagaggaattgataagagtatagaaatgttataccatacttgtataggactttgcaaaagtagaatagactttgcaaaataaagaaatcactgaatgccattttgggattttattcgttttattatttaagggaagaggacattctaggaaataaaatactatttgaaatttcgaagttggaatttttcctaaggtgcatgtatccttgatggaataatcattttcttggttcctttcccacatttctttatctggcccactctacttttattcttttttgctgttcttttcctttgtctttttcattttctgatatatcctgtgtgtaggatggaacggtgattatacataccattcagaaaggtcagtacatgaggactttacgaccaccttgtgagagttctctgttcctgaccattcctaatttggctatatcttgggaaggacatattgttgtctactccagcactgaagaaaagaccaccctcaaggtatatgacctttcatgcaatagaggtagactcccaatagcatatctttccctccccacattatagatgaggtttattgaagaaggaaagaacaccatattttaaagatgatgtttttctttcatcattcagttgttcgtttcttaacattagatggccttctaccacaatcgtagcctcacattagtattttattattgagatttctattgacttgtgtaatatatgatttcaaaataatttctgcttatgtaggattttttaagcttaagtggaaactggaaatgatagccaactgaaattccttttgcataaggcagggtataaataaacaagccctcaattttatgtttgtttcctgtcagtgacatcactatttatttaattaatatgtgtgtgtgtgtgtgtgtgtgtgtgtgtgtgtatttttttctgagacagtctcactctgttgtccaagctggagtgcagtggcgcaatcagtgatacaattatagctcactttggcctcaaactcctgggcttatgtgatacttctgcctcagccccctcagtagctgggactactggcatgtgccaccacacctggctagttttttttaatttttgttagagacgaggtctccctacgttgcctaggctggtctcaaacccctgggctcaagcgatcctcctgctttggactcccaaagcactgggattacagacatgagccaccatgcccagcctaagctttttcaatattaagagttttggggggccgcgagtggtggctcactcctgtaatcccagcactttgggaggctgaggtgggtggatcacctgaggtcaggagttccagaccagcctggccaacatggtgaaaccccatctctactaaaaatacaaaaattagccgggcatggtggtgcatgcctgtagtcccagctactagggaggctgagacaggagaattgcttgaacccaggaggcagacgttgcagtgagccaagattatgccactgcactccagcctggacaatagagcgagacatggcctcaaaaaaaaaaaaaaaaagtctgggcgcagtggctcacgcctgtaatgccagcactttgggaggccgaggtgggcggatcacaaggtcaggagatcgagaccatcctaactaacacagtgaaaccccgtctctactaaaaatgcaaaaaaagattagctgggcgtggtgttgggcacctgtagtcccagctacttgggaggctgaggcaggagaatggtgtgaacctgggaggcagagctttcagtgagccaagattgtgccactgcactccagcctgggtgacagaacgaggctccatctcaaaagaaaaagaatttttttcttttgttttaagaatgtagagttttggggagggctgaatgagattttaattcttctttggagagagtgagatttctcgtttaatatttacttggcaatctgatttgaaatcactttaataatattgtctacacacttggtctttaaatatagccatatttttatcctaaaatgttaagccaaataattattctgttatagtcagagttttaactggttatataaaaactcagtttttatttgaaattgttgaattttccttaattcttttcaggataagaatgcattacatctgttttctataaatggcaagtatctagggtctcaaatcctgaaggaacaagtatcagatatatgtataatcggagaacacattgtcacaggcagcatacaaggattcctgtctataagagatctccacaggtaaataataaaaactaatgaagtatcacttaagaaaaggggcagtacttctagtctagagtgaaaatcaggaatctaagatttttaatcttttggtttatcattgattataaaagtttctcttttagcaagtataaaaaattggaggagctaaagtattcctagattcataaaggaaatatatatatacattttttaatatgtagaaaattttacattatatatattttaccgcaattaaaaaattttttaggctggacatagtcactcctgcctgtaatcccagcactttgggaggtcaaagagggaggaatgcttgagcccaggagtttaagaccaacctgggcacatagcaagacctcatctctactaaaaataaaaactttaaaaattagctgagcatggtagcatgttcctgtgttcccagctacttgggaggctgaggtgggaggattgcttgagcccaggtcaaggctacagtaagctatgatcatacaactgcactgtagcctggacaacacagcaagaccctgtctcaaaagaaatgttttaaatatgtagagctagaaaaaaatgttcatagtaccaagtctgtattatggatttggaaatttgtccaaatgatggtttgaatttttataaagtttttcttaactgtggtaaaataaagtagagtatatttaacatatttaagcatgtgtgtgtataaaattgttatggggatctgttgtcatttaatctagtgaaggagagagatactggagtagtggatacgtgtttttgttttgttttcttttttgagacctagtcttgctctgtcacccaggctggagtgcagtggcatgatattggctcactgcagcctctgcctccaggttcaagcgattctcctgcctcaccctccacgtcagctgggaatataggtgcgtgccatcgtgcccagctaatttttgtatttttagtagagatgaggttccaccatgttggccaggctggtctcaaatttctgacctcaagtgatccacccacctcagccttcccaaagtgctgggattacaggcatgagccactgcacctggcccgagatttctgggcttcttacccaccactcacttatgaatcaacaaggcaaaaagcatgtaatgagagggcctaggtgctcaatactgtgatgcttactcataataatggtttttaaggggtttaagactagttggaagctgggtgtggtggctcacacctgtaatcccagcactttgggaggctgaggtagctggatcatttgaggtcaggagttcaagaccagcctggccaacatagtgaaaccccatctctactaaaagtacaaaaattagccgggtgtggtggcgggcacctgtagtccccagatactcaggagcctgaggcaggagaatcacttgaactcaggaggcagaggttgcagtgactgagatcgcaccactgcactccagcctgggtgacagagcgagactccatctcaaaaaaaaaaaaaaaaagactagttggggaaatatcaatatttgtgtactgttgtgaacagtttaagagctaaattatatgattccagttacatgtgcaagatgagttttaaagacattaaggattagcacggatctgagtagtcagaggagtcttgatgaaggattagtaggaattaaatggacatgacaagacagggagggccttcttttggagatggaggtaggcaatatgtgaggaaataaagcacaaagacgtaggaacagcaatgaacatggtgtgtactgtgctgcatttcagggataagatcagagcaagactagaacaaatgcccactgagagtctgaggctcagagaacggtgactagtataggaactttatttctatctgttttaggaagaacactaaggataaaaatctagttagtatccatatagaatcctgtctaactgttgtgttccttactttgtctctcaccttccctctaatctctctaaagggaacgtaaagactatttaccttagataaatgatgaatgtaataataagatgtaaaaactgaagtaataatagaatgggttggaaaattgaaaaaagagtaagattctctaggaagtcaaaattcttatattttagcttcatggttgctttattaatattttgtttgattatatatggttagaagaaaaatagatgtcaaaaatagagaaaaaaatctatcaagtatcttaactaatgctgtaaatacaggcccttgtgtgagtcacttagactttctggacacaagttcccacatctgtaaaattagaatgcagaactagatgagcattaatttattttccagatataaaattctgtgaattcattataaatccgtgtaattatgtctgtattttttatttcttttctagcttgaatctcagcatcaacccattagccatgcgactgcctatccattgtgtttgtgtcaccaaagaatacagccatattcttgtaggtttagaagatggcaaattgattgtagtgggtgttggcaagcctgctgaggtaaaacctagcatcagtaatttcatttctcatgctgttggggattactttggttctccttcattccaactgattgagaagtcaccattagggataaacaaattaaaagccaaatttgatttttcaaaaggcagtaaataaaaacaggataaagctgttattcaagaatcatgtttatgttattattgaaagcccacctttggcaattctatctaccactctataggaataagacagttcatttcttccaaatctagattcaagaccacaacttagattttcaatacataagagcctttgcaaaagaataaaatataggctcaaacaataaaactactttagttttaacaaatactcatcataactatttgtcagttgttcttttgtaaaagcatcattttttatttgtaactacaaatatccccatttagtgtgcttattctcagtgagtttcctatagttaaatttacttgctaatgatttatcaattattgaatattcagatatcataaatctaactctcactcttaggaaaactttgtagttatactccagtaacttactgattcttccaaataatttgtgttattacatagttaaattaagcattataaatttttttaagtcactgttggtattttctgagaaatctaacaatatgggatctgtcggggttatttcaagggaagaaattaccgtcacacagtcagtggctataataacctgttaaagatcgtaaaaacctgttttataaatatttgaaacttctttagtccttatgctttttttcagcatattattttaccaaaaaaaaagtgtcattaaattaatgttattatggctgggcatggtggctcacgcctgtaatccctgcactttgggggaccgagacgagcggatcacttgaggtcaggagttcgagaccagcctggccaacgtggtgaaaccccatctctactaaaaatacaaaaattagccgggtgtggtggcatatgccagtaatcccagctactcgggaggctgaggcaaaagaatcacttgaacctgggaattggaggttgcagtgagcggatatcgtgctgctgcactccagcctgggtgacagagcaagactctgtactacagtttagaatatgaactagatccatatttagttacaaaaagatatttctatttcaagatctatttttatctaaaacatcaaaatcttgattaatatgtattttttaatcatgtaccagtttatatattattctattagagtgaaaatcatatgtaaaaatcagatggtaaggtagtagtgcttcagaaaatacatctgcaaatgtatttggcaaaagaagcatgccaaagcctctagtactttgtatgaggcttatcttttatcactccaataaatataccctggaaaagcaaccattaggcctggtgcggtggctcacacctgtaatcccagcactttggaaggccaaggcgggcggatcatgaggtcaagacatccaggccatctcagccaacatggtgaaaccccgtctctactaaaaatacaaaaattagccgggtgtgggccaggtgcagtgctcacacctgtagtcccagcactttgggaggccgaggtgggcggatcacgaggtcaagagatcaagaccatcctggccaacatggtgaaacctcgtctctactaaaaatacaaaaaaaaattagctgggcctggtggcacgtgcctgtagtcccagctactctggaggtggaggctgaggcaggagaattgcttgaaccaggaaggtggaggttgcagtgagccgagattgtgccactgcactccagtctggtgacagaccaagactccatctcagaaaacaacaacaacaacaagaacaacaaattagctgggtgtggtggcgcatgcctgtagtcccagctacttgggaggctgaggcaggagaatcgcttgaacccaggaggcgcaggttgcagtgaaccaagatcgtgccactgcacttccagcctggcaacagagcgagactccatctcaaaaaaaaaaaaaagaaaagtgaccattaaaaaaggtggcaagctgggcatggtgactcactcctgtaatctcagccctttgggaggctgaggtgggtggagtacttgaggccaggagtttgagaccagcctgggcaacatgtcgaaaccctgtctctactaaaaatacaaaaattagctaagcatgatggtatgttcctgtagtctcagctacttaggaggctacggtgggaggattgcctgagcccaggaggcagaggttgcagtgagctgaggttgcaccactgcactacagtgtgggcaacagagtgaaaccctgtctaaaaaaaaaaaaaaaaaaacggtggaatcaccattaaaaagtaggttgcacttgagaaagtaattgcaacaaaccataggggatttttgccccatctggatgtataaacacttttaaaagacatttattcattcactgatttaattactatttggttaatatttattatacactgggaaggatggtaggtgatgcaaatttaatggtgaacaaaatgcaattcctgccttcaaggggcttatgctctccttgttttctacattactttttatcattctgttgttaaatattatttttgaaagccttaaaatattttaaaattactttcttttcatcaaaactttattttactttcttcttatccttatgattggcattaacagtactgcaaattctagaaaagaaaatctccaaacctgtatgtcttgttagcaaaattaagaataattttgagccaggtgtgttggctcacacctgtaatcccagcactttgggaggctgaggtgggaggattgcttgagcccaggacttcaccagcctgggcaatatagtgagatctcatctctacaaacaaataaaaaattaattaaaaattttaaaaaagaatagttttgagaagcttattttgatgaaataatacatatttttgataatttataaaataaaggaatctggtaactttgacataacgaggccattaattgtttaaatgtacacactgacattagagctttctcaaagacaaaataagtgtaaaagtctttcattattattattgttattattatgtgtgtatatgtgtgtgtatgagagagagagagtttcactatgatgcccaggctggaggacagtggcacgatcttggcttactgcaacctctgcctctcaggttcaagcaattctcatgcctcagcctcccaagtggctgggattacaggcgtgcgccaccatgttgggctaatttttgtatcttcagtagagacggaagtttgccattttggccaggctggtctcaaactcctggcctcaagtgatctacctgcctcggcctaccaaagtgctgggattacaggcatgagtcaccacacctggccgtctttctctattattgataacctttaaagtgttaataattctgctaacaatttgtttcttttcactctgcaaaatcagtgtcttacatatcttttttttaattttttcttaatatttattcttcatttctttggattactttacacagatgcgttcaggtcagctttctcgaaaattttggggatcgagcaagcggctcagccagatttcagctggagaaactgaatataatactcaagattccaagtgattgttatttccattttctgttatgattactgaaacctgatttattgctttgtcactttaaccacatctctcaactctctgcaatgttgcaaggcttttatccctgaaaatcatttacagataaccacaatttgctgtggtatataaactaattcttggtctatactaagatgtatttgagaaaatacatttgatttgattttgtggcccattcctaaaggtcattgtatccatttttaaaacaaactaaaatgagaacattaggttcaattttcttattattccaaatgataaaatttaagatttttctaataaaagagtacagataatgggacagttgagagagatggctttaaatacattcttaagtaatcattttcctatttactgaccactgtaatgaaaatatatcaatttatttatggaactcctgattggggataatattttaaaggtatctgttgcacacttggattttcaaaactcggtgaaagttacaagtttgcatggtaagaataaaataagaatattgaaactggtacattagctaattctattactacttagcgtgtttctaatgagaagttactgaaatctattactgtccttaataaaaattgagtagaaaaaagtggaactagagatacattttacagatgtatttccttaataatataattaagcaaaagtgctaattgtgattttgacagttgggccttttaagtagcatttgcagcacaatttgcatttgcaaagttccgaatttcttgactctttcttcactaagcaaatactgttttactctaataattaagagttagtagtacccaaatatgttgaatttttacttaggatatctgtgtgattgatgaatgaattgaaaagatatgtataacttaaaataatcatttatatatagtaatttaaaaatttctatttcatgttttaggattatagctaattttattatatagtgttaaatgttgtggttgattattaagatcttaaagtaaaagtctgatttatttaatttggaattcaaagacattgttaaacttagatttttttgtaagattatcttttgagttaggtcagagagcttttacaactaccagtgttattaatctgagatttcatgtgtttgggagaacttgtgaatccctctgaaattgtgcagagactttgtatgttaaatgcattttcaggaaggaatggttacatggctttctttaaagggatctgtttccagtaatagtattcttttttgttccacaaatcatagatgtccttaaatccaattgtcttctcagttgaatcttagagaaatttttcttttgcaatttcgctttcctgttgaccacagtatccagtgcccttttctttataatcttttgagtgagtaaaaaaattttaagaaataaaggattctgtttagggaaacttttgaatagatttgatttgatgtgagtcagggctaataaaaagctatagaagaattttctttccaataagtaaaaatcctctgttttattaaggaaaaaatagctatgttttaggtaaataactctgaaataaactggtacaacaattgtaaaatagaacatatttaaatgtcaaggtgtcttttcttaagacttcaggaatttgtattgaacaaagtctcaagttaagtagcaataattatgatgcataaatgagactggcatctattcatttattttattcttttttggggtgatgggaggtttcaatccagtgcttcacccgtggtgccaccgtggctatctttttttttatcttacagttttttaggagatttcaagtcggcagaactaacatgattgatttttagtttttaaaatactgatttttttagaaactttttctaaatcaaaacctactaagttttattttgttatttatccagagattttgatgtaaaaatgccttcatttttaagattacttaatactggatttgaaaattattttggatgcttataagttttctaaaacttagataattagaaaaaatgcctaagtttatgatgttttactatgctgctttttagatggaagaaataagcagtttttactttatagtacaaataagttttgttcacaataaaatagatatcctacctggactaatactagatgtacaaggtagtggaattatttcttatattgctttttccaaaaagtaaaaaccaaaaatgtgggccgggtgtggtggctcatgcctgtaatcccagcactttgggaggctgaggcaggcgaatcacaaggtcaggagttcaagaccagcctggccaacacagtgaaaccctttctctactaaaaatacaaaaattagccgggcatggtggcacatgcctatagtcccagctacttgagaggctgagcagcgcaggagaatcacttaaacccgggaggtggaggttgcagtgacctgagatcacgctactgcactccagcttgggcaacagagtgagactttgtctcaaagaaaagaaaaaaaatatggaatttagagaaaaatctttgagaatactagcaacagtctagagaatggaacttaaattttatctgttaaaagaagcaaacaactattagtgaataatatattactcatttaaagagtatagcctactgaattaaaaatcactagataaaataattggaaagaagtacttttgagaattctggtatatttagatgttacccatagaaattagttatatattatataatgggagaaatgaacagtatcattggaatgaaataacaggtggacatttcaattggtgaatatagtatctcaagttggctcttacaaagtctgttacctggccaattgtggtggctcacgcctataatcccagctctttgggaggccgaggtgggcggatcacaaggtcaggagttcaagaccagcctggccaacatggtgaaaccctgtctctactaaaaatacaaaaatttgctgggcatggtggcaggtgcctgtagtcccagctactcaggaggctgaggcaggagaatcgcttgaacccaggaggcagaggttgcagtgagccaaaatcgcaccactgcactccagcctgggcaacagggcaagactccatctcaaaaaaaaaaaaagtctgttatctttgcaaaactttttgtatgcttttgtttcttgatactggtgatgacaaaaataaaaatctcagcatcctggtgataggaagagatttataccaagataattattttacttttggaaaatgagatcaagtattaaaacatgtaatagctgtgcacgcttagagaataaagaacctttataaaatttttttacaactgtttgcaatcagtattctggcattactcagataaaattgtaagagagaaagaaaaatagatcagggcataaaaatcaggaaagtatataaaaatgaagtttggcaagttggtttagtctttctttttagcctgtgaagctcacgtctgttattaagttaataacaaaattaaaatctgttaactttgtttaggtcacagtgcagtgcatccttttgtagaagaaaaaataccaagtgttcattctgtcattagcaaggaacaccaatgaggtttcttttttttctctatttagggcatattaaaattatccttcagagtacttgtattgaaaatcaagtttatgcttctgaaaagaataagtgggctctcagaattagaattcagatttgacggttgaatcttaagacattttatattttgtgtgaaaaggagtggtcaggggaaactgttaacttggataccagatttttatttaatgatgatagagatatgacctttgcctttatgtatattttatattgttactactaaagagaccactgaggaaatcttgtaattgaacttaaggaagttagctccttttatatatttataaaatgagtagcattatctttaccacctttccactgaaaagatgcaagtcctaggactatattaaatataaatattatattattaaataatatatgtaatatgggtgtctgttggggttatgtgtgtgtaaagattggtcttttcaaatatgtatatttaaacctgtcttctggaaacaggttcttgaacctatctttaggatacagtttttgactgggatataagaaatgaaacatgtttgtttgtttcctttttgtttgtttgtttgcatcatcagccatactcatggcttatcctacgcattgttcctctcatcagctgaaactgtttctccccaataagtgagcaatcttaaacattttcatcactctttaacaaaatccattctcaatattctttttgctgaattcgtatattgtatatgctcaacatattatttgttttaaacttgactccatccagagcattgttctatagagttttcctgtatttatcagagtcatgtggtatttttcttgatgaccttaggcaacaatatagtgttatcagtcatcattttaatatgatttaaaatgtggaccacagcctgccttctttagtttaaatctaggccaagcatggtggctcatgcctataatctcagcactttaggaggctgaggcaggaggatcactggagcctaggagctcaagaccagcctgggcagcatagtgggctccacctctacaagacattaaaaaattagccttgtgtgctggcaagcgcctgtagtcctagctgctcgggaggctgaggcaaggggtttgcttgagcctagagatcaaggctgcagtaagctgtgattgcaccactgcacttcagcctaggtggcagagttagaccctgtctccaaaaatacatttttttaaatttaaatctggcagtttctaggccagtggttcttaatggatattacagatcagacttctctgtggagtttataaatatacagatatgtaggcactgctttggacttcatgaatctctttgcttgatattcttggtattaaaaaattatgtctgaggattattatgttatatcctaaaaatttttctgcatagaaatttgtccatttatctttatataccagatccaatattcagacttatttgaaaataggcttaatcattatcctgagggacattttgtctaaaatttgcttggaatggctttattatctttgttttgcctgccacaaaaacaacaaaatctcctttcaattgagttatttttatcatgaactctctttagactgttcacatttgaaaattataactaatatttgcctccagaaaagtacatctgtttgctaatattagttcctggtgactttcagtgaacgttttgcaaacttgaattaggcaacattttaaagaagaaaaaaacatgactaacatgctaaatttaaaacataaaagtagatctcttagagccttgaagcttgtaatcaatagaattttcctaattaaaaagcattgggtaaattatctactacttccaatgacttttgcaggtacagcctctgtatggaaataatctttaattttttataggtataacagagaagaacgcattaacatttaagatgtttaattccaaataggaaataattcagttttctgtgttaagaaatgtaaggccatcctagagtataggagttacgtgattttcttctgtataaaaatctcatttaatagtggctgtattatcagatacttatttgattatagtaattcatcagacacatctccttcgtttggtgattatctcattgatctttgtcacacgtgagtgatttctaaacacattgcaggatttggacctgtaaagccagtggctttagtgataagtaaaagggcacattcaacaatatttacctttgtcttaatgcccataatcttatgaactgaaaattcagaaggaaaagaacaaatagaaagctactaattcaatatttgtttttcatggtacggttttcatgtttccttggaaacatattttgcaaatataacaataatagtaataacacaattttgtcatttaaaaaattacccattcatttttcaaacttgactgttagtggaggggtatatgtgtgtctgtgtttccacttatgtaatggctgtctcattatttaaattaatttataattatttttcagtgtacagagtgattagcggcttgtaatgctgttacaatgtagcattgtaatgtaagatgaagaaaaattaggatttaggtgggatttttaaaaatttatcaattcagctactttttaaaagaagtcctattccaattggacctttaaaatttttattttggtaatatttcaacttaagatgtattaaaactagcaattctgtggtaatcagtgtactagtcaacattaaaatgctattttgggttgtcttcttttggtaacatattctgacactaagcaacatgttttacaatttagtgggatgaacctacaaattcataaatgcttctctttattttgaaggaaaaagatacttgtctgtatacgacataattgttttactcttcagaatgtgaaagttatattaatcactaaacactttaagaagtggttctggtaggatatcagtagtcagacttaattgaaaaactgtcagcgtctgttttgtatatagggattaaagaggataactttattttttcctttggaaagaataattcttttggaattttggaattttgattttcttagatgactttttagcaatttaatgataataatttctatttttcttccaaaactatggcatgttatagtagatcttactattaaagatcttttatattttaaactgtttttttcctattctgctttttgctgctctcaaagactgtgattgatgaacatcaccaaactttttttgtggcaaactgcttattttataagtagctttatataagaaaacttcttagaaaactatgtggctggttggttccatttagaaactcttaacaggtatggctttcattcctccagttgtttgcttttatagacttggagcaaaaaatatagcaaaaagtaatcatatctggctagatagccatttctctcagattcattgctataaaaatgaatctactgaggcataaaaatatgaaacatatttaattcatctcttttgtcagtttttctgggactccaatagcatttcagtgttatagagagtgacagtgacttgaatgcatgtatatgcacatagtcaattcagagcgtaataactaaaaattcagaatgacttgttttttgaaagtacttggaaattgtgctgctacttaaatattgaaggaattcagaaagttgtgtatttatcttaaaatgttccttctcacttattctactggaattgaccatgaaaaagaaaatattatgccttatttatatctaattattgactgtgcaaactgtgactcagtggatatttgtatgccccccaaaaacattttaaagctgagcaatttttaataaagatgtataaataattttgattattctcattgtagttaagttactgttagtttggtgcaatacattctttccttcctcatccttttaaaattaaatatataagatgtatgttttgttttattacattaagtgctatttttaaaaaattcattgtgtgtatatgagctaatacttgatttgtttctgtatagcatgattaaagataattgaaaattttgcacttattttaggcccttggaaatttgtattctaatactttttaagaatgtccatttattttgtacataataaattagctttgtatatgaaaatgggtttgaatcaaataaaaaaagtgatgttactttcttca

SEQ ID NO: 2 - DNA, 28353 bp, Homo sapiens
gtgggggcgtggcaccaggaagcggcgtccgcgccgggcccagagccgcagccgcagccgccgctacagtccgggccgggctccaccgcgcatcctgctccactctggcgaccgcccccggggcccccgccgcgggcgcggcgcccgccatgggcgaggaggactactatctggagctgtgcgagcggccggtgcagttcgagaaggcgaaccctgtcaactgcgtcttcttcgatgaggccaacaagcaggtccggcgcgcccgcgcttcctcccccgcgcggccctgccggggtcgtgggcgcgccaaggccggtcccgcgcgaccaggcccgagcgtcccctcctgtcctgtcccgtcccgtcccagcgcgggaggcggcgcgcgctccttccttgttgggtgggctcagccgcggccaggtgtcctcgcaggtgacctcggggctggacccccgagccagctgcgcggatgcagtggccccgtggccagtgtctcaattgttggcgcgcccgtcttatctaggcttcttttgttgtgtttgtcattagttacactcgtagtcaagggtttagacgtcgagattttcattttccttgaaattttgtaaagggggaaaagactgtacttcaggcgtatcagcggcgccgatgcgcgaaccggtgttagaacttggagcctcgggaacccgacccggtgtcacggtggcatccttttcgctctctgctcttggtttttaaaattcacctgagcagccaaacatctgtaccttgatatgtgccgtgttactttagttgaacccagggtggtgtataacagaaataatcgcttgcgggttggcttctgagtttagatcctttcagagttcaggctgttaaccttgctgcttttccctctcaggtttttgctgttcgatctggtggagctactggcgtggtagttaaaggcccagatgataggaatcccatctcatttaggtaatggtatagacactttcagatcattttgtcatgtaaacagaatgatgtttttctaattcaaatggttttttataattttgtcatttggtctgccctaagaggcctgaagtctgtgtgcgcacatggaattcctgtctgtagggagggtcttcgtggcacttactagcacctcttgtcagagtggaatatctggagcagttgatttgggagccaaatacttcaaaagtggggcagccacttcctagcactggaaattaacaagtcagcgtgatgatgtgcccatttctggtttgttcacagaggagggcgttcatttctttagcccaggtctttccagagtggcaggtggaggagattcattgtttctcatgtaataatacaagaaaatcatggcttccactatacttaaggtgactgcatagtcccagttcgcactgttgaacaggtttaatgatcaacagcagggcctttcactttcagaagtgtctcgatttggatgataagctatctggccactgtaacactggtgcttacagaaggtgaaagtataatgtaggccctcaattcagtagtgacttaaaaaattttactgttggtctgtgttaatgagaaactgtccttttttgagagggagcctccctctgttccccagggtggagtgcagtggtgcgatcttggctgactgcaacctccgcctcccaggttcaagtgattctcctgcttcagcttcccaagtagctgggattagaggcgcccaccaccacgcccggctaattttttttgtatttttagtagagatggggtttcaccgtgttggccaggctggtttcgaactcctgacctcaaaacgatccgcccgcctcagactcccacagtgctaggattacaggcatgagccgctgcacccggcctgagcaaggttttaaagtatggatggggttcgagcatggtgttttggggaactctgggtctgtgtaactgaaggttacatagggtgtctccacagggaaggggaaatggtggtggtgtggccactggcaggggccagcttgaaccttacatattctcctatgaaattagagctttatcttcttattgaaacttatcaggtggggtgtgggatgatcatgtcagtgtttggcaagatcatgctgttcacagcacggaggctggcttagttgggagcctgtcagagttagggatgctatggagagtagcaatcagcgagccatgtgtggtgaagagcagcgctctggtggtgtagagtggcattgcataggcaatcaagggatacttaggaagatgggtctctcgtaagacccgggggtcggttgggtgtggaaaacgagtgagcccgtgataatctagattgggggctctaagaagtttgtgggtggggggaaggtactgaatttaacttaaaaagagtttttagactgggcgcggtggctcatgcctgtaatcccagcactttgggaggccgaggcgggtggatcacttgagatcaggagttcgagaccagcctggccagcatggtgaaaccctgtctctactaaaaatacaaaaattagccaggtgtggtggcacgtgcctgtaatcccagctactcggaacgctgaggcaggagaatcacgtgaacccgagaggcagaggttgcagtgagccgagatcatgccactgcactgtagcctgggcaacagagcaagactccgtctcaaaaaaaaaaaaaaaaagatttttaaaagcagctttattgaggcatagttgacacataataaactgtacacacttaatattatgcaatatgtgagttttgacatgtatacacccatgaaaccatcaccacaatcaaggcaatgaacatgttcagaccccgaaaagtttccttgggcccttctgtaatccatcccttgagttttttttttttaaatgaatttttaatttaaaaaatgtatgtattggaatagagacggggtctcactgtgttgctgaggctggtctcgaattcctgtgatcctcctgcttcatcctctcacagtgctgggattacaggtgtaggccgctgtgcccagctgagttcactttttaacatctgtctgaggcggtcatgagacactgtagtggagccatctgggttgcataatgaatgtgctgtgagatgcacaagtagatagttctttccagaagctttgctgtgagagagaaacagcagttacggagaaggctcctgagcgggtctatagttatttatgttggaacaattctcaggtgatatgtgtgtgtgatctgaattcttcaatcacttgttacccataatactgtaagtttcccagcaagttctttccagttggatttggtagtttgaaaagaggtcctactgatggcttccgaaacataattttaattttagactagaatttgctgcctcctgaatatagattgtgtcttttgccttttcaataaatggtagtagctagaattcggttatttaactactaacacaatctttcttcttaaagaatggatgacaaaggagaagtgaagtgcattaagttttccttagaaaataagatattggctgttcagaggacctcaaagactgtggtaagacttatctttaaaatacagcattaaagggcattagaaatacatttggaagagaaggaatcgcaaattttcagtgttaaaggaaacttttattatcttactgttgtgaaaggtatagttatgttgcattgtattagagccttcaaaaacgaaaaagacatttgagtgggttaaaaaaatgaccttagtttgatttttaaattaaattaaaaatttttttttgagccagtcttcctttgttgcccaggctggagtgcagtgatgtgatctcggctcactgcagcctcgatctctcaggctcaagtgattctctcgcctcagtctcccttaaaaattgttaaaaaataatttggaacttcatgtgtcttttgtattgcttgatagcagcatagaatatgtgaggtatttttggctactttgtgaattagccttttcatctctcatttctgagtgctagatctgataggagcagatattccaagttgaagcagcctacaggcactttagcccgtgtaaatgttcaccattgccgtttgtagagtagagggaaggctgttagaaacaggcagaatcctctgttagtttcttccatcagttttaagtgttaaagtcttggggaagcctcttagtgcagcaacacatttctctgacatcagctgcttgaggaatgaatttttgaaaggagttactaaactgtaactgaatatttgtattaacttaaaaaaaattgaatcgtaagcctgctgctgttgagacagatgatccgaattggtctttttatctttcctgtgttttggttgtcttcagttattttctggtcactttttaagttaatatttatttttcttgtcttgtagtatgccaacgtaggttggcagtatgctgcctaatccaaatttgtgtgtgtctgtgtgtttttcctttcaggatttttgtaattttatccctgataattcccagctggaatacacacaggagtgcaaggtatgaccccaggccctttctcagctgctggtgtcagtggtgttgagctgggttatgtagtggagagcggggcattggggtcgcagggagcacagacttgaagtcagactgtccctcatgttgattcccaaactggagtcaggcggggtgtttgctttgtgacactgaacagttttctaagtttgaaagcttgttcctttggagggggagggttcaatggatgatgcgtggtgaacacccagtagtgctagcccttggggctgtcgtctgtcttgccctttttctcctcactgggctgacagcacatctgggtctgggccctgggatgcctcacagccacctggagtggaggtttctggtgaggagtttctttttctgtttcctgaagtttcctttcctcaatttgttgtctttgtcttgtccttactctttctttcttctcctaggtgttgattctaatccacattaatgagatttgctgggtgtagtaaactaggctagagggagctgagctaaaattggcagtgtggcaccttgggcgctgacagaagctgctagtggttggggtagggctttctgcatttttgtgactgttttgctcaatggagttcagggcggactctttggtgaggagaggtgcatccccaccactgtcctgcctgccctgcagtggccccgtgtgaagagaccctcagcccggcccttctcaaacctgtctgccctcaagcgagtcgggtgtgtgtctcagggtcctcaacccattttagtcaacactcactaaagacccttaggcctttgtacatttttaataaccatttttataacgtgggtgactaagaatgttggcagtatggtgattcctgcaggtagaagctgctgtctgtgagctctggtcagttacttttctacaaaacacagacttctcctgttctgtttagtagaaggaattaggattcaggttcttgaatgaagagttatgggcaaaaatcagggaacattgtatttaaaagaaaatttgttttgttaattagtaaacattccggggaacgttcattaaagaatgacaaactgcagagtttgtgaagcttttgaagagagttatatgtgttttttcttattaattaaaaatatttttaaaaaatttttcttagactaagaatgccaacattctaggattctgctggactagttcaactgaaattgtcttcataacagatcaaggaatcgaattttaccaggtattatgtttatcatttatgtttgttggttaaagttcagtgatagcattctggcagccttttgaattcagtactgaatatatatatatatattttaaacattttctagagatggagtcttgctctgttgcccaggctgcagtgcagtggcaccatcatggctcactgtaatctcaaactcctgggctcaagcaatcctcctgcctcagtctcctgagtaggtgggactacaggcatgtaccaccatgcctggctaatttttctttttattattttattttattttattttatttttgagacggagtttcgctcttgttgcccaggctggtggagtgcaatggcgcgatctcggctcaccgcaacctccgcctcccaggttcaagcgattctcctgtctcagcctcgtgagtagatgggattacaggcatgcatcaccatgcccgggtaattttgtatttttagtagagacgggatttctccatgttgagactggtctcgaactcccgacctcaggtgatccacccgcctcggcctcccaaagtgctgggattacaggcgtgagccactgcgcccggccctggctaatttttaaacttttttgtagagacgaagtcttgctatgttgcccaggctggtgtcaaactcctaacctcaactcctgccttggccactcagctttagtctcttgctggggattttattctttttttttttttttataattgcaagtaataaattaaaaaaaaaaaaaagaaaagaaaaagggcttggtggcccatgcctgtaattccagctctttggaaggccaaggtgggtggatggcttgagtccaggagtctgagaccagccaggccaacatgatgaaatcccatctctataaaaaatacaaaatgttagtcaggcatggtggtgtgcgcctgtagtcccagctacttgggaggctgaagtgggaggattgcttgagcctgggaggcaggaggttgcagtgagccaagatcacagcactgcactccagcctggatgacagtgagaccccatctcaaaaaaaaaaacaaaaacacaacaacattaaaaagtgggcaaaggccaggtacagtggctcacacctgtaatcccagcactttgggagaccgaggtgggcagatcacctgaggtcaggagttcgagaccagcatggccaacatgacgaaaccctgtctctattaaaaatacaaaaattagccaggttggtggcaggcacctgtaatcccagctactagggaggctgaggccagggaattgcttgaacctggaaggcggagcttgtagtgagctgagatggtgccactgcactccagcctgggcaacagagcgagactccgtctcaaaaaaaaaaaagtgggcaaaggacatgagcagacactttttaaaagaagacacacatgcgaccaacaaacataaaagagctcaacatcactgatcattagagaaatgcaaatcaaaaccacaatgagaaactatctcacactagtcagcatagccattataaaaaagtcaaagaataacagatactggcaaggttgtggagaaaagggaacccttatgcactattgctgggagtgtaaattagttcaacctttgtggaaaacagtatggcgattcctcagagagctaaaagcagaactactgtttgacctagcagccccattactgggtgtaatatgcagaggaatataaattattctaccataaaggcacatgcacgtgaatgttcattgcagcactgttcacaatggcaaagacatggaatcatcctaaatgcccatcagtgacagattggataaagaaaatgtggtacatatataccatggaatactatgcagccataaaaatgaacaagatcatgtcttttgtgggaacatggatggagctggaggccatcatccttagcaaactaacacaggaacagaaaaccaaataccacatgatctcacttctaagtgggagctaaatgtaagttatgaatgcaaagaaggaaacaacagacacggggggctacttgagcaggggagggtgggaggagggagaggagcagaaaagataactattgggtactggacttaatacctgggtgatgaaataatctgtaccacaaaccccgtgacatgagtttacgtatgtaacaaaccttcacatctatccctgaacctaaaagttaaaacaaaaaacattcaaacattgcaagatatgtaatatggaaagcaaatgttccctataatcccgataaataattattatgaacagtttggtgcatattcctctatttttaaaaataaatacaaacttctttttaacaaaaaggggaatgttgtatataaacttttgcagctagctttttttttttttgtccaaagtgtatcttggacatctttctatattttattctgactgggtagtattccactgtatggatggactgcagtttaaaaattttcttgttattggacattggctggttttccatttttttgtgattacaaataacccttcagtaacatgcttgtacacacttctttatattagagggagagttgcagtataggtacgaacatctgaaaagctgaaccagtatcgccaaatttcttctagacatgtgtattttcactagcaatataggaacttctgcttttcatacctttaggaggactggatattatcagtctatagacatttgccaacctgagaggtagaaagacttttttttttttttttttttctgagacagagtctcactccgtcgcccaggctggagtgcaatggtgcgatctcggctcacggcaacctccacctcctgggttcaagcaattctcctgcctcagcctcccaagtagctgggtctacaggcgcccagcaccacgcctggctaatttttgtatttttagaagaggtggggtttcaccatgttggccaggctggtcttgaacccctggcctcaaataatccacctatctcggccccctaaagtgctgggattacaggcgtgagccaccatgcctggccgaaagacattttaatttgcattttacattactagggaagtaagcatcttttcatttgtatattgtccatttgtattttgttaacttcctcttaaaatttttttattttgtaataattattttgagacaggatctctgtcacccaggctggagtacagtggcacaatcacggctcactgcagcctcgacctcctagcctcacgtagtcctcccacctcagcttcctgagtagctggaactacaggtgtgtgccagcacgcccaacttaatttttttttcctttttttttttttgtagagatgaggtcttgctgtgttgcctagactggtcttgaactcctaggttcaagccattcttctgccttggcctcccagagtgctgggatttatgggcatgagccactgtgtgtggtcaaaaatattttttttactgtggtaaaaaaacatacaacatttattatcttaactgtttttaagtgttcagttcagtagtgttaagtatattcattcacattgttatgaaatagctccagaacttttttcatcttgtgaaaccaaaactatccagtaaacaactccccttatcccttccctgcagccccagcaatctctattttactttctgtttctatgaatttgactcctttttttttaagatggagtcttgctctgttgcccaggctggagtgcagtggcgtgatctcagctcactgcaacctctgtctcctgggttcaggcgattctcctgtctcagcttcctgaatagctgggattacaggtgtgcgccaccacgcctggctaatttttgtatttttggtagagatgggatttcaccatgttggccaagctggtcttgaactcctgacttcaggtgatccactcacctcagcctcccaaagtgctgggattacaggcgtgagccactgtgtccggccgaatttgattaccttttatacttcatataagtgaaattatacagtatttgtccctttgtgactggcttatttcatctaccataatttcctacaggttcccccatgccatagcatgtgatagggtttcctttttaagactgataataccgcactgagcgtatacaccacattttgcttatccattcatctgttgagggacatttgggttgcttctgcctcttggccattgtgaatagtgctgctgtcaatacaggtatgcagataccgcttcaagatcccgttttcagttcttttagatttatacccagagtgagattgctggagcagatggtagttctgtttctgaatattttagggaaccgctatactgttttccatagcagttacaccattttgcaatccctccaagtgtacaagggtcccagtttctccatatcctcaccaacacttgctgttttgttttgttttgtttttgatactagccatcttaattgtggttttgatttgcgctctttgttgattagtgatgttgagcacttttgtgtgtgtgttttggccactttgtgtatcatctttggagaaatgactaattcgggtcattgtgcctatttttaaaatcaaattactattatttgttgaattgtagttctttatatattctgatattaacaccttcttagagatacaatttgcaagtattttctccgaatccggaggttgcctttccactctgtggattgtgtcctttgatgtacctgcctgtttcttttcatctgttccagcttcctgacctattaagcatgcttctgagatctctaaggggaactaatttagagggtgttaagagttctttcaggttttaattttgttgacctaatgaaagtcatataatttagaatgtatggttagagaaaatacacctgtgtgttaatgccatggtgctttgctgtaaggccatcatcgaaatcttagtaatgactggctgggcacggtggctcatgcctgtaatcctagcactttgggaggccgaggtgggcgatcatctgaggtcaggagttcgagaccagcctggccgccatggcgaaaccccgtctctattaaactccatctttactaagtgccgtctctactgtctcaaaataaaaatacaaaaattagctgggtgtggtggtgggcgcctataatcccagttacttgggaggctgaggcagaagaatcccttgaacgtgggaggtggaggttgcggtgagccgagattgtgccactgcactccagcctgggcaacaagagtgaaactccgtctcaaaaaaaaaaaaaatttgtaatgaccaataggagaactttaaacaaactttagacaaattccatacacacagaaatagaattttgtacatgtgattgcatgggaaggatggcttgctttctgggggagttccctatggtaatcatttaaaagtctgtctttctgttctctgcagtgggaaagtataccttaaggttacctagatggcttcagatcttcaagaaaaaagttaaaaagaaagaagactctagcacatcctaattattatagttcttaagaagcttacggctcctgcccctgacttgcgcagcagttcttcagtgcagtgtaccatgagcattaatgtcttgggggctctgtacagtgttctgtaatatcggaatatttagggtacattgaaaatgtgcctggattataaagtactgcatttgtatggagtcttatgaacacatctgctagaagaagggagctcctcccaggcccagtgtagactggagtcgaggtggaggccaagcagaaggcagatctgccatggtctgggaggtggccgagttaacacatggggtcctggaggtgtcagtttcttttggccgtttcctggatgaggagaaatttgttgtaaattgctcttaggtgtatccatgtgctccacatgcccaggcatgtggaggcacagataaggattttggagggaaacagcctacccaggctataattgctttgttaaggggcaggttccctaatccactcttggagccttgtttctcatctggctaatagggccagtgatgcctgcctctcagtcgtggcaaagagtaaatgagttaggaggctctgtaaagcaccaagcatagggctggttaagtagtagctgtaataagtacaagtgagaatgttcatttcacttagtgggtttcttctgctttttattctcagagcgcactgtaaggatcttctgacagtttgctgttattgatttatttattaattgagactgaatctcgctctgtcactcacgctggagtgtgatggtgcaatcttgactcactgcaacctctgcctcctgggttcattcaagcaattcttgtgcctcagccttctgagtagctggaattacaggcatgtgccaccacgcctggctaatttttgtatttttagtagagatggggttttaccattttgtccaggctggtctcgaactcctgacctcaggtgatccgcccaccttagcctcccaaagtgctgggattagtttgccgttttttaaatgaagatcctgtttcttaaactctgcttcaggtattaccagagaaacggagtctgaaactcttgaagagccacaatctcaatgtgaattggtacatgtactgccccgagagcgccgtgatcttgctgtctaccacggtcctggagaatgtcctgcagccttttcactttagggtaagaggaagcctcccctgaaaaaaacacctttccccagttgtcccctgttcctgtagcatcctaatgtgtcaggcacgttagggacaggttcctctagccgtaacgtcaccgctctgaccactagagggcactctgtatacccgtcagctcctggagccattcattctatgctgggcagacaggctgtgagaggacatgggggacggtggaaaggatccaaagacgaagtctgtgtttatccttgttggttttacacagggaatgatgaaacattgaaggggtttaataagcttttcctaaaacattttccccctaaacaggctggcactatgtcgaagctgcccaaatttgagattgaattaccagctgcgcctaagtcaactaaacccagcctttccgaaagagacatcgcaatggctaccatgtatgtccgtgtcagagagaattccatcctgtgattgctttcagtaatataaataatagaaggagtgtgttacaagcaccacgtgatgccctgacccctagaacacataaggaggactccccttgttctgggtattcagtgtataggtcctgtgaacatagaaaacctgcagtgtttttggcattcctttttgatttttatcagctttgtgatgctaaggaattcctttacctttctagcctgataaaacaagaacattgaaccaatttatttcttagtatctttgttttagaatttcttcttctttttttttttttttcgagacagagtcttgttctgtcccctaggctggagtgcagtggtgcagtgtcggctcactgcagcctccacctcccaggctcaaacgattcttctgcttcagcctcccaagtagctgggattacaagtgtgcgtcacctcgcccggctagtctttgtatttttggtagagacagggcttcaccatgttggccaggctggtctcgaactcctgacctcaagtgatccacctgccttggcttcccaaagtgctgggattacaggcatgagccactgtgcctggccaagtttattttttttaaaagctcagttaaataataattgttctaaataagaaaatagattaagattttatgtaacagacatggaactaaattacgtatatatagaggtatattttcttttactttttttttttgtttgtttttgtgatggagtcttgctctgttgccaggctggagtacagtggcacgatcttggctcactgcaacctccgcctcccaggttcaagcgattctcctgcctcagcctcccgagtagctgggactacaggtgcgtgccaccatgcccaactaatttttgtatttttagtagagacagggtttcaccatgttggccagggtggtctcggtctcttgacctcttgatctgccctcctcagcctcccaaagtgttgggattacaggcgtgagccaccacgcctggcagtacggaggtatattttcatttgaaaaagtggatatctcagtttttaaatttgtaatgaaaattttaaacacacaatagagactaataaaaaagaacccctgtatgcctgtatctgattcgacaatagtcaaaattttgcttctaagttacttctgattcttctgtggcctaaaacagtggcccaaactttcaaactttatggtagttagtataatgttctttcatttcttcttcctttttttttaaacgtactcttctgtggcattcctgtttatttttaaattttttttggagagtgtcgctctgttgcccaggctggagtgcagtgttacaatctcagctcaccacaacctccgccttctaggttcaagtgattttcctgccacagtctcccaagtagctgggactacaggcgcatgccaccacatctggataatttttgtattttctgaagagatggagtttcaccatgttgcccaggctggtcttgaactcctgggctcgggtgatcctcccgcctcatcctcccaaagtgctgggtttataggcatgagccgccgtgcccagccagcattcctgtttagacaatagataaagtgagagcagtcctggctgaagtggaggtggggacctgttccctcccaccttggtctcctccttgtccctgggcaggcccagcacagagtttaccactggactagaatatgcattcaggaactgttcacagcaacatttattagatggcacttaaatagaaaaggctgagcatggtggcacacacctgtaataccagtgactggggaggccaaggcagggggatcgccttgaggccaggagttcaagaccagcccgggcaacatagtgagaccctgtttctacaaaaaaatttaaaaattagccaggcacggtggcacgtgcatgtagtcctagctactggggaggctgaggtgagggaagatcgccaaagcctaggaggtggaggttgcagtgagctgtggttgcaccactgcattccagcctgggtgacagagggagaccctgtctctgaaaaatgaaaaaaaaaaatagtgattatattttcctgttattaaggaatatacattcattatacaaaacttggaaaacagagaagaaaatgaacttagcatatcactcaagtataactattacatgtgtttctttccaatcattttagactctatgcttaggtttggggttttcttttaaaatattatgatcaagctgtgtttagtgtgtgttctcttttccacttaactttataataggctttgagtaactgcatgtttctttgtaaacacttgttggcagcaaaatactccattaagtgaatatcttataatttacttaaccgtgatgccatttagaacaaaggaattttgaatggccagatgtgatttatgtctgtttgttccctaattagatacgggcagctgtatgttctcttcttgaggcatcattctcggacctccaacagcacaggagcggaggtggtcctctatcatctaccacggtagatttcatgctttgttttccctctctctctgattttaaaatgtgaactgcagcttgttgatctgttttttgctttctatcctacagagaaggtgcctgtaaaaagatgcacatattgaagttaaataggacgggaaagtttgccctgaacgtggtggacaacctggtagtcgtgcatcatcaggatacagaggtacaagctgtctgcgtttctaccaaagttaaggttgcttaaaagccttgtgaaaattggtggctgggcacggtggatcacgcctgtaatcccagcactttgggaggccaaggcggacagattgcttgagcccaggagttcgagaccagcctgagcagcatggcaaaaccccacctatataaaaaatacaaaaattagccgggcgtggtagtgcacgcctatagtcccagctacttgtggggctaaggctggaggatggcttgagcccaggaggtcggggcttcagtgagtggagatcgcgccactgcactccagcctgggtgatggagcaagatcctgtctccgaaaaaaaaaaaaaattggcaaaatgtctgaataagactagaaagtgcatttttatgctaagagttttggtcttccagatggaaatgggtttggtagtctcaagtagtttagaaaaaagtgattgtgtcagttgattaaagataattcaaaactatttcagaaactaacgcttgagatttgaccttggaagaaggtgggaatccgctccattccacgagtacttgaactctctgttgcaattgtgagcatggatgacagtgctgggggataatggttttgaggccgtgtggaccaggacaactagaatgggtcctgtgggctgggcctctgatataaagaagctgcttacctcctctaccctcccagagggtggtgacgctaactctgtgacacgtgaggatgtttccagttgaaatgacagagatctgcttaggtcactttgagtgagctcatcaaaggaagcatgtcataaatgcaggaaatacttgtgagaggagataaaaatattaaaagagagttgtgatgttaatgacaaattccttctcaagtaagagctagcctgtagggaggaaatgcaaacacaggcttttaaactgatttaaacagcaagatgggatggaatgaaagcaactgggcaaaccatgattgattttggcctcagtcttgtctttttcccccccagacatcggtaatattcgatatcaagttacggggagagtttgacggctccgttaccttccaccaccccgtgcttcccgctcgatcgatccagccctatcagatccccatcacaggtaacacgggttctgtagaggagtctgtgctgccctttcaccatgtggctgtgttctcaccatgatctttgggagtcacgttaaaagtggagtgaggaataaacagagattcccagatctgtctgattttgccaggggccatttgttccagttttgttgttgttttgagacagtctcactgagtcacccaggctggtaggtagtgtcgtgatcttggctcactacagtctccacctcctgggttcaagtgattatcctgcctcagcctcccaagtagtggggattacaggtgtgtgccaccgtgcccagctaatttttatatttttttaaatttatttttttgacagagcctcactttgttgcccaggctggagtgcagtggcatgatctcggctcactgcaacctccacctgtctgtcacaaggttcaagcttgtgaggtattcaagcaattgaaccaagtattcaatcgcttaaatacttgtgagaggagataaggttcaagtgattctcctgcctcagcctcccaagtagctgggattacaggcgtgcaccaccacgcccagctaatttttttgtatttttagtagagatggggtttcaccatgttggccaggctggtcttgaacttctggcctcaagtgatctgcccaccttggcctctcaaagtggtgggattacaggcatgagccaccacgcctggcccaaatttttatatttttggtagagatggggtttcaccatgttggccagactggtcttgaactcctgacctcaggtgatccgcctgcctcgctctcccaaagtgctaggattacaagtgtgagccaccatgcccagcctgttctagttttttaaaaaatgcaactactactgatcctataagctaaaattatgttgtgaaaaaagcattttctaagatagatgaatctcccttgggaggaaatagaataatttatcttccctgagctttagaatggatagttttgattagccgttgatggtgaaatatgttttaatattgaatacacccgtaacgttttctgtttgccttagctctgtaacgctgaaattaactttggctgtaggtttgttactgtaacctgggatcacttttctctttctcacattccgtgtgacagtgatgatgaatattgcattctttgggactgacagtcacagtaagtgcttcggctgtggctcttaggcttacccaaatcagtcctccttctgtctggagaggtggggttgggaagtcagaagagtggaggtcaggaattcaggaaaagggaaagaagtcatttatttgcttcgttttgcctttttccagtgtaattgattttaagatagaactgaaagaatattcaacacacactctctctcttttttttttttccttaaacagaactttattttctcacagttctggaggctagaagttcaagatcaagatgtctgcaggtttgctttcttctgaggcctccctcctggcaggcctctttgcagatggccaccttctcactgtgttctcacagggtctttcttctgtgcctgtccctcgcagcagtctctcccggctctcttttgaaggagattggagtgcagaattggctagtctgaggtttcagtgtgcaagacgtagtcagatggctcacatttggaaccctagtagtaatgttttattctttgtccgatggcattgggcgggttgacccagcctgcagtcaggatttccttgtaccgttcacccgggagttcagaatcgcactctggctgaaagttcagcaagagcaccattgtcagcctgactgccctgtcttgctggaccagccaaaagcttagttactttctggcacagttggaggaaggagctggttcttaacagacgttcaattaggtcttttggctttctgtgttctttcaagcttcttccttttcctttgtaaataatgttagtattgaaagaatagattttgccaagtgattgtcttgtgtctgctgcccacttggcatgaaggtaactgctggtgaattgggggaaaaaaactaaacatttagaacaagcctgtccaacccacggtctgtgggccacatgtggcccaggacagctttgaatgcagcccaacacaaattcttaaactttcttaaaacattatgagatttttttaatgatattttttaagctcatcagctattgttagtgttagtgtattttatgtgtggcccaagaccattcttcttcttcctcttaaggcccagggaagccaaaacattggacacccctggcttagaaccttcagctctgttccggtggtacaggaccagttaggaggcatcaggttctaaccatctggtcataagggaacagatgcgaggcctggtcacagtaacagcccgtgcagagatcaataggaggaaatcaggaatccactgagggtctggggatctaggtagtgtgggctgcaaagcattttcagaggttagtgactctccttttgtttcctgctgggctgtgagccctggcggcttgatgcatccgtgtgtcttgcccactgtgctgccactgggtgggcgtgctcaggaattgaatgggcctgttgagaaagatataaccagcacttttgggaagagtcagccaccctttttctttttgttttgggcctgttagaacagtgggtctcaatctgactacatattaggatcatctggggggccttaaaaatgaaagctctcacctgacagtgtgtaggtcagccacccaaaggtgagggctgtgcactcggcgcagaccttgacacttaggtccaaagcgcgagtgctcttcgccaaagcttgtctgcctgggctctttcctacctttgggtggtctgttcacaatgaccctttctctgaccagctgattgaaacctgccttctgattgtacctgggtaattggaacagaaccaggagtcatggttagcttgtagggctgcctgcatggctcatgagcagtataactggttgttaacggtccctgtcatgtgaggttttgggggtctgcttcccagacgagctcactgtgcttggacctactctatgcaatggataatcgaactaattatttagataattaagtggctgggcacagtggctcatgcctgtaatcgcagcatgttgggaggctgaggtgggcagatcacttaagcccaggagttggagaccagcctaggtaacatagaccttgtcttcacaaaaaaaaaaaaaaaaaaaaaaaaaagaaaaaaagttagggcatggtcacatgcctgtagtcctagctactctgaaggctgaggcaggaggaccacttgagccaaggagttcgtggttatagtgggctatgatcaactactgcactcaagcctggacagcagagcaacaccctctcttaaagaaaaaaaaagataattaagctacaagccacatttatttgaaacattctccgtggatgatctgggtatttgattttgaatccttcaagtaaatttctcagttccttaacgtgcatatgtaaacgatcatgagtcatctttggttattaaaaataacccaaaccacagtgattgaagccttgacatgctttctttttcttggtgagattttcctggattgttagctccttcccccttcctccccgtacgtgctttcagtgagacggaacagttcatttcttccttgactacaattgaataaacatttcgtaatgacattaaaaagtattgacttttgtgtcataagtaccagcatttgcagcattttctgactgcatcgttgcacttatgttttctcaatttgtaggtcctgctgccgtgaccagccagtctcctgttccatgtaaactctgtatcctttactaaggtgtggcaccgtgcacaacagggcaagtggtcaccctcagagagtggtcctgaagtcctcctccgggcagctgtgaataacactccgagagccaccccgcaggcagcttccctgactgtccaggggcctcgcgtttagcgtggactcagtacatggtgggcaggggcgagtgctagcggaaactgggtttgctttttgttttcatcttttcctggtttagaatttcctataacatgtggattcttcatcttggattgtctttcaacctgacatcattatcagcgcaagccaaggtaggtcagcggggacagttgtcgtgttacaacatggtgcttgttgactttggatcccagttgtagccagggacgttttcaaggtgaatctcttagaaatgacccctcctttcaagcgtgggaatgggatttttttttttcactttatacgttttttactatatgtgcattttatcaagaacatatactacttttaataattaaagcaacaactaagaatgccattctcctgcttaagcccattctggaaaagccagactccaccccagggtggatggaaagccggactccaccccagggtgtctccctcatttctcccatcgaccttcccaccggtgtccgtgcccttttctgttctgcatgagcccgggaggtgtgctcctctttctggccttgctgaggaagcctcctcagtctgttaattgtctcttcctgggtaatctctttattagagaaatcttttttttttttttttttttttttgagacggagttttgctcgttgcccaggctggagtgcaatggcgtgatcttggctcactgcaacctccgcctcccgggttcaagcgattctcctgcctcagcctcctgaatagctgggattacaggcatgtgccaccacgcccagctaattttgtatttttagtagagacgaggtttttccatgttggtcaggctggtctcaaactcccaacctcaggtgatccgcctgcctcggcctcccaaagtgctgggattacaggcatgagccactgtgcccggcctaaagaaatcttatttttttaaggcagggtcttgctccgtcacccagcctggagtgcagtagtgctatctcagcttactgcagccttgagctcctgggctcaggcgatcctcctgcttcagcctcccaagtagctgggcctacaggcgcacatcaccacgcccagttaatttattataataataataataattattttgagacggaatctcgctttgtcaccaggctggagtgcagtggtgccatctcggctcactgcaacctccaactcctgggtttaagcgattctcctgcctcagcctccccagtagctgggattacaggcatgcgccaccacacccagctaatttttgtatttttagtagatacggggtttcaccatgttggccaggatggtctcgatctcctgacctcgtgatctgcccacctcagcctcccaaagtgctgggattacaggtgtgagccaccacagccggcctataattttttttttgtagagacagggtcttgccatgttgcccctgtgtctctaatacctcgccaggctggttattagagaatctcctatgttactctttaatcctctgtgtattttcctgcctttcctctggaattcctaagaactcttgaggagagaattagccctgatgctgtaggcatccactgtatgtaatgcattgttgtgccttgtctgtaacccatagcctcatgtgacatccactgtatgtatgtaatgaagtcatttctctcctgtgcatctcgctggtgttttcctgtacagctgctctgtacctgccttgggccaactgaaaagggggtcacccagatgattttttatgtggcacttcattctcctgtggcatcccaattgggaaaggccacaccagatgctggcagtgtgggtgatcagtacatttatgggtcgatgaatggatgagttatgatgttccattgagagcctctggagttaccttttaaactaatgagctgttgtaggagaaaccaaagcacaggactgaagttgatgccacgtgttgacatctttttctattttaaacgttaaaagaggggctaggtctagggaagtccccgtttggaatgaaggactaggagctacacctttgatgtgcccctgaatgcagaggttacttggaaaagagtcagccaggtgtgcggtggttgggctgtcatcctcctgtggtagacacgctcctgaattgctcctgaatggctcagctctgctttggttaggaaggaaaagctacactgactgtactttgcggctttttatcaccacctgccacccgccccgcagatgtttaggggaaccacttttgggcttttgttacggtttgcatcatactgttttatttgctgcctcttaaaatccaggttacctctggaacctccaagtgaaacttgagcccatagtaaatctcttaccagacaaaggaagactcatggactttctcctccagagaaaggaatgcaagatggtcatcctgtctgtctgttcacagagtaagttgaatccttcccccttgctctgattccagtgtgaggcctgtgctgcccaacactttttatcgggatgtgggctacattgttgtgtcttgtctgtgacccacagcctcattctttatgtgaggggtggctatgtgaccccctaggaaaggctgctaaatggaaagatgatttgtagagatactggtagaaaagaacaataaatgggatggttctgaatgaaagtgggcacacaggaggggagtgggccaccacccctggccttcacacacacctctttcaaaatccaagccactcactgcatatgtgtcttctttaagaatcccctactgaggccaggcatggtggctcatgcttataatcccagcactctgggaggctgaagcaggaggattgcctgagcctaggagttcgagaccagcctggacgacaacatggcaaaaccctgtctctacaaaaaaaaaaaaaaaaaaaaaaaaaattagctgagtttggtggtatacacctgtggccccagctactccagaggctgccgagggaggattccttgagcccgggaggacgaggctgcagcgagccgtttgtgtcagtgtacctccagcctgggcgacagagcaagaccctgtatccaaaaaaaaataataataataatcccctaccaatatgtgctgttggtgtttgtttttgttttggtatagatggggtcttgccttgttgcccaggctggtctcaaactcccagcgttaagtgatccttctgcctcggcctacccaaagtgctgggattataggcatgtgccactgagcctggcctgctatagcttttttttttttttttttttttaaccgtaaccagaaaggggttgcgaatgacatctagctgtcaggtctttaaagtagagtgtcctttaaaggtacttttgcattggtaaccttttgagattagtttttatcatagcaacgtgtggaaattctgaagctgacatgaagttggtttgatccgtgtgtgaacattgtgcctttccagtgttaagtgagtcagacagagcatcgctgcccgtgatagccactgtttttgataaactcaaccatgagtataaaaagtacctggatgccgagcagagttatgcgatggtgagttacatggagtatgacaaagggtcctcctcccccaccccctcccgggtattttctaagtaattatgatgcaaaattgtttcctatatattagaataaggtcgctgagatttgccgcctgccatagggcaaggtggcagtagtgggggatagtggaggagtagtaaattcagggtccctgcatcccacgagctggcggctgcatctcacttcataccttcactgtttttgtttttcccatctgtgtttgatcttgcctgtagatccttggtctactgttatagatgagaaaaatcagtctctgctttgcaatattttgtatatttttctgttatgccagagtgaggacttagaaaattaaattagaaatatttatatttgccacacctttcttcccttttgggaaagaatcctgttgagatagtgacgattcagtgttagcacttagcaggcgtgtttgtagtcaaggtaataaccatggcttatcgccaccaattcccgctgtattacttgtacatcatatcttctgaagccagaagaaaagtttaggacaaggagaatgaattatttcaattccaggatctgattagtcctaggctgaaaatggttttaaaccaacaaaagccccagaactccactcccctttagctgttcatggaagggtaagaggtctgagacaggcactgaagagggccagttgctgggacagtgtccattcctacgctgccagacgtgagggatggctgagtccttttggactctattgctgtgggtgttctgggctgtgggaatcagtaggtctgatcccaaatggcagtttctgtgccgtcccacacggtctgctgggctccataaaccgtcatgactcagcagtgtgggccactgaccagccacatgagcagcatctggagtttcttggaaatgcaagttctcaggctacaccccacagctattgcataatctgcacggatctgaactgcttttttttttttgagacggagttttgttcttattgcccaggctggagtgcaatggtgagatcttggctcaccgcaacctctgcctcctgggttcaagggattctcctgcctcagcctcctgagtagctgggattacaggcatgcgcacaggaaaaagttgtatctaagtagagaaagtgttttccgctcatatcctgggtccacatcgaagaattcagtccttgtggatgaactgtaaacagcacccttcctctaagatgccgaagatcatagtttgtggtttttttctttcaggcggtggaagcagggcagagccgaagcagcccgctcctcaagaggccggtgcggacccaggcggtgctggaccagtcagatgtgtacacccatgtcctgtcagcctttgtggaaaagaaggtgggctgcagctttccgcctcttctggactgagaatgctcaaaacaaggaagttgctgaaaacgaggagacttcatgtgattagagtcacttgaagtgattagaatcactggagtttccttgggtgaggccctagagctggtagtttggcttctaatgctgaggcctaaagcataattgttgacgggtggttctggagcgatgtgtgcaaaaccagtgaaagatgaacactgggccattttaagatggaaacaaggtgggggttggatagagagttatatgcagcctcttttgcacctcgttggtatttgtaagaccacatttttttctccctaggagatgcctcataaatttgtgatagccgtgctgatggaatacattcgttctcttaaccagtttcagattgcagtacaggtaccttcaaatcatctgggcccaagttaaaacagaaggaatttaaaaaaaaaacacagtcactgtcttagaagatgactcatatgctaagacaggtctgcctccctgactcagaatgctgagtgactcctgacattattagttggaatgggaagtgtaaggtcaagttggggtctttacctgcatgacgaaaccacttcttgtaatgacagacttttactgtgttggttagaatagccagtccttggggagcctctagtctgttgtagctgaatgatttggaagtgttctttcactttttacttttgtcctcagcattacctacatgaacttgttatcaaaacccttgtccagcacaacctcttttatatgctgcatcagttcctgcagtaccacgtcctcagcgactccaaacctttggtatgcattgccagatttttacttccattgtggttaaaaatggaaaattttaaccgttatctttccaactgaagtgggtctaaaaatgtctttcaggcttgtctgctgttatccctagagagtttctatcctcctgctcatcagctatctctggacatgctgaaggtaactctgatgtgtgaggttttagactatggaaactaactctgttcctgttgtttgcactgacctggacttctctcccttactgctagcgactttcaacagcaaatgatgaaatagtagaagttctcctttccaaacaccaagtgttagctgccttaaggtttatccggggcattggtggccatgacaacatttctgcacgaaaatttttagatgctgcaaagcagactgaagacaacatgcttttctatacaatattccgcttttttgaacagcgaaaccagcgtttgcgagggagccccaatttcacaccaggtgagaatgcaatgaaaagacttggggtaaccatagcctcaaagagtagcagagggcactggcagctggtgggcgaggaccctgggttagcatttttgtaaacaacacaatttgataacagcccacctagcccttggcccattatttgtagtagagtgaattcagtatactgacagaatctgaattatgctctggaactcaccgaggaggtgtgttttgagtcaagacacatttaggacccagatcaggcacagcccatctcttatagcagatcttggaatatctcttaaagccaggaataagacggcaaatggtggctaagggttttaaagggtctggggcttattaaggtttcagttttatgaagtatacattggttgatcattctcattttttttttgagacagagtctcgctccgttgcccaggctggagtgcagtggtgtgatctcggttcactgcaacctccgctgggttcaagcgattcttctgcctcagcctcctgagtagttgggactacaggtgcgtgccaccacacccggctgatttttgtatttttagtagagatggggttttactatattgtccaggctggtctcaaactcctgacctcatgatccgcctgcctcagcctcccaaagtgctgggattacaggtttgagccaccgcacctggccctggttgatcattctcatctccaaatagttatacaacctaagacatcatctttaggatagggaaggatcagggctgtctaatgaaacttctaggtctatttctagctcaatgtaagacggcatttagttaccataaggacaggttagatagaatctcttccatttagcttttgtatttgtctctcaaagcagatagggtaaccccaaaacttaggaaaacaatgtattttattaaagaaaaataagttaaaacccagtagacacacctacgagatgctttctttgtccctcatttcatgccacatctaactggcaattaaatctcttcctttctaggggaacactgtgaagaacatgttgcttttttcaaacagatttttggagaccaagctctaatgaggcctacaacattctgaaatcacttgctgtttttttatataaaaatgtgtacaaagttaatttattgcattaataaagctctttaaactataaaatgttataaagtgtatctacaacctcaactgtcactaaaaa

SEQ ID NO: 3 - DNA, 136040 bp, Homo sapiens
gatgcgcatgcgcggccgatttgcacatgcgcaatactcgcgctgcctccgtggtccctgcctggctgaggtggcagcagggggcgggacgcgcagcgctatggcagagggcagcggggaagtggtcgcagtgtctgcgaccggggctgccaacggcctcaacaatggggcaggcgggacctcggcgacgacctgcaacccgctgtcgcgcaagctgcataagatcctggagacgcggctggacaacgacaaggtaaccggggctggcggggccggagtcacaggttcctgcggggctgagccgggccaggggcggcgtctgtcagggacccaccgcggtctccctcgtcccggcagcagagggaccgcgagtgaccccagacctgcgggctccgctgctctgcgggcgccgggggcggtgagaagggggagccccagcaacctccggaaaagcgaaggggtttcctgggtgttctctccacctgaaaaggtgccttcaaggctctctggatgggattggtgaacggtggtgcctcgagaagtgtcctccaaacacccctggaggcgtttggctgtgtgagctgggagagtggaggagagcacaagactggatatgaaacagatgcaaaagagcagattccaagataaggtagcgcaaatgggggtcgggagaccaagagagcagtggtagggataagggtgcatttccacggacaagtgacaacaattgcaataatttgcagcgcgaaagaactacctttgcccgtggctgaaatgaactcatatctactagtttttgttgagccaagcgctatgatttgtgggctcaggctgtatttctttagaagataaactgacagcatgctctcacaagtacctcctgaaacttaagttggactttacagctcctcacatacccagccatctcttctgtctctgtgggtcgctaggtaaattggtcatgacagtgtaacataaagaagaacatatgtcaaagttagagagttttataggtgaatatgtaggtaactgaaaataagctgtcgataacaatttgattccgatatgtaaaaaaataacattgcaatgtaatgaataagaaattagggctctggagactaccacttattagatagaaccactaaatgtgtgcatcatgatttgagtaagtcccttcactaatctcagcttctgtttaggaattaggaatcctgctgttaagtttctcatggttgttatttgaggactcagtgagagactccaggtaaagtcctttgcaaagagcctggcacttactctttcttaacaaatattaattttatcataaaatttatgaagtgtttaatgtgtctcatattgatatttattatatcatttaagactgctacttgctctgatatagataacatggccttcttttttggacagagttttgctctttttgcccaagctggagtgcaatgggcgcagtctcggctcactgcaacctctgcctcccgggttcaagcgattctcctgcctcagcctcccaagtagctgggattacaggcatgtgccaccacgcctggctaattttgtatttttattagagacggggtttctccatgttggtcaggctggtcttgaactcctgacctcaggtgatctgcccgcctcagcctcccaaagtgctgggattacaaggcgtgaaccactgcgcccggccacataaccttctttttaccatgaggaaaataaagcatggagagagtgcagctaggttgtcatataactagtaactggtggaactgtaatttgcatctgagtctgtgatttcattcgttcaacattactgattacttctttgaaccagaccttaggacatttcaaggctatagtctaaagaaactgcttcacttcatgggttttttttttctgtacagtaagtatttatagttgtaaacatatttttgcttcctctgaaatattaaattgaatttatataaatagttttactgtttttgtcaatccagccaatatttcaaaataacaaatagaaacatgaaagggtaagcctactagaatatacagtagtggaggtgtagaaatgtatatctgcagaatttagtgtacaatggggatgtcctgggcttggttctctgctctctcttccattcatgttttctctgtaagaaaaatcttgtactttcatggttttaagtagcaaaaagcatgattactctcaaatttataactctgtttctgacatctactgagctccagatttgtagaattagttgtctatactatacctccaattggatactgattgacgtcatagaacttaacatgggcggaactcttgatttttccctaaactggttccgctctcactaaagaacgtcaccatttacccagtcaagcaagaagcatatgaataattttggattcttgtcacttttttttttttttttttacatctcctgcaaatccacaaacatatcttataggttctactttgaagaatatttttggaatatcttttttttttttttgagaccaagtctcactctgtcgcccaggctggagtccaatggagagaacatggccttactgtagccttgatcttgctggctcaagcgatcctcctgccacagcctcccaggtagctgggtctacaggcacatgccaccatacctggctaattttttgatttttttatagagataggggtcttactatgttatgcaggctggtcttgaactggcatcaaactatcctcccaacttgacctcccaaactgctgggattacaggtgtaagccaccgtgccatattttggaatatctctttttcatttgtactactgccatcttggtctaagccactatcaaaccatactgggattatttttgttttttctcttacctacctcctttcttgtacccctttaccattcattttccttacaaagttggaataaacttttataaatataaatcgtattacattactcccctgcctaaaatcgtaataatttctcataacttcagtcatagtggccttccttctaccactttagggtctttgtactcattgtttgctctgtctgtggaaggctttgtccccatgactggctgttgcctacactgaggcctcagttcaaagtcacctcagagaggccttcccctttaagtttctccaagttctacttccagttattcagtttctagcctggaggattccagtacttattcttaaatagatcattccagagatagttaatgtgcacattatatatgtgtcaactaggtatacacaagtaagtatgcatgtatatattccttttaagtttttaactgttggtattacaactgtttctatgccttgatgtttcacttaacatatctcaaagcttatactacgtaagtgcataaagattttttttttgtgaatgagtatatcataatttatttaaccaatcccttttagatggacatttatattatttctagtctttgcaattcccaacaattctgcagtgaataatcttgtatatataacactatacacaagtaagtatacccttcttgtgttctggaaataagcatgcttcagtaatttgaaggtcattcaatatttttcggattggttaatgaaaataaatcatttgaaaatgatttcattacattttgtcttgagatttgaaaccatttaaaaattagttccagtaactgtcttctgttaccaattgtataggagatgttagaagctctcaaggcactttcaaccttttttgttgaaaatagtctgcggactcgaagaaatttacgtggagatattgaacgtaaaagtttagccatcaatgaagaatttgtaagcattttcaaggaagtgaaggaggtatgtaaactcttttcatttagcatatattgagaacttactattacgcctggctctgtgctaagtatttttttgaattaggttgatatgtttgctatttgtatactatgcccaaatagaaagcttagctaatttctcttgctgcatctagatctttatttgtattaatgtgatttatgaatctgtgacttccacaaatattaattcttagaaagttaacattgttctagaagattatcttaggaattttagcttttttaacaaaaaaattaacatttccctgaatggctttccaatagaaatatcccctcattgcataaacctctcttggataacaacttctctactggagattaattagaattgagttacttttactatatcctaaaatatgaaaatttcagattaagatcagtaacttcaatgtattaataatgattcatcatacttgagagtgtagtccactcaccacagagtgaaaataaattttatgttattatatctttattatgtaatattttattagctgttttaatacattgtaatactaatatatttctatgtgagttatggaagtgttgcacatggtttcaatgagtgttcaataaaaataggttgtttttgacaccttggtaggtttttattgactgaagactaatactttggaaaggatttttttaaaaaaaattacattagagatggactcttgctatgttgcctgggctggagtgtagtggctgttcccaggtatgatcatagtacactacagcatcgaactcctgggctcacgcaattctcccacctcagtttcccaagtaactgggactacaggtgcctgccaccatgcctggctcttttaaacatcatttcctactaaaaggaacaatcttaccagtatcagaaagcaaagatgctatctgagactattggatacatgtcaaaaggactttggagctaatgtgaagaggattcttctactggccaaacataagactatttgaacatcaataagagtaactgcaattgaataacactagcaataaagggatattcagttttataaagcatttgctgttttcctgcggtcatattctctaaaaggaatggactattttctttacattttttctaacactagatgttattctttttaatcatttccaattttaaatatgggatctcttgtcatgccttgaccaaaaaaataaaaaattatgtaactaaaataaggatttagctaacagaagagaatcttcttcttgctgtatatatgatgtttgatgttacttttcttcttttcaggaacttgaaagcataagcgaagatgttcaagcaatgagcaactgttgtcaagatatgacaagtcgcctacaggtattatataatggctagattttggcatagttcctgatataaacttacaaaaattattattgacaaaatgtgtagatatctaatccataatgccctgtaggaaatttgggtataaatataatccttatttttaaaaattgtagctatctttgtgtttctttggataatgatttattaatattgttcaattaactttagagcatttatattttggtctagccagtacagagctaactacgtagaattttgataaacctttcaattccgtaatattctagaaatctaggagtaatgattttttttagtaagaagccttaggaataatttcacactaaagctgtgcctgataaagacctagcttaattctgatttatgcataaccttaaaaaattctgggaaaatatgtatacttttaggtcttttaatgaaagcagtcctaaacttatagtttggtagcagaatcagcatttgacttaattaacctcattcatctaattttggaatagtacatagaacggtttcctcctaagggccaatcatgattatgtctactgccttcacattttaacagcgaatttatatctctaagtgtctcttggaacgattgacatcaacagtgattctaggaagaatcattaatgcatattctacagattaatcacaggctacttgcatcatcagtttgcaggatgagttaatttcttgtttctctaaaattttatcttttctggtcttgtctaaattttgatattcttactaatctatcagatattattggcatgtttattgtctcttagtccaatatttagatatttgttaatttgacaatatttaaataattatataatatatactaattattaatggccatttcacatttttggcatatatttactttattcctcagtggttgattttgtttgacccttctttttctttaactttatttccttttctcctcttttagcttccatgacgtaatgccttttctcaaattatactttataaggttttctatattgtacttttgtgttttttaaataacattatgctttgttatattagactactcagtttctgatctttagtgatagtatctcttattttttaatttgtatccttaattatgtttttatacttttcatcatagagagatttaaatataaaaagatcatagtatttttatttgtgctatttttcaaacagtttataaatattttaaattacaaccaaagtgtctctttctgttttgtcctttgtattttttttttttttttttgagacagagtctcgctgtatccttagtggcgtgatctcggctcatagcaacttccaccttctgagttcaaacaattctgcctcagcctcccaagtagctaggattacaggcgcctgacaccatgcctggctgatttttgtgtttttagtagacacaggatttcgccaggttgtccagggtggtctcgaactcctgacctcaagtgattcacctacctcggccttccaaagtgctgggattacagacatgagccaccatgcccggccagtcctttatattttctttgcacccacctcacatcctgttttttcttctgcagtggcatgggcctattttctttctttattcagatcaactttattgaggaataatttatgaatggtaataaactgcatccattcaaagtgttcaaattgataggcttggcatttttatatgcctgtgaaacaacaactataatcaagatacagaacatttttatcacatataaaagattgcctcatagctttctgattgaatatttaaaaatatttaatactgcctattgtttacatttgtttttgatccacatatcatttttaatagtaggaggtccatgattttgaaagttttgtttattccttaaaattttgcttaaagctaatttatttggatatagcactattggaattctaatagtatacattcataatatcaactctaatgtttttaagttattcataaagaaaagtgtttcttagagtatcctcactttccctttttcttatagaatgttgttataatgattcatttaattatttaatattttctgaaatgctttgactatggtaccttttagaaattattagaaaacatttaaaaatgtaatcagtcattttatatatgttaatatttattcctttgtggttttccttgcatatgtttaaataataaacatgcatttagatgcatatgtttattattaactcaaaaataatcatctttaacatttaagataaatggagattgaggttaatcttcattaatattattaaatattactttggaattcttaccatagtttataaatgaaaaaatcaggaaatatgcaaaaaaattagcaaattcttattatataacattgtgctaaattatcatatttcattgattaataaatggtgttgattgtaaggtgcaccctcaataacgactagcctaaaaagctagtaaaggttttttgatgttgattttgtgaagcattctttttttcagaaatattaaaatgtaaacatatctttgacttgaggggatactatattttaaaaattgcacaaggcaagactgtacaagggtggaaatggaactttagcatttaagaagtatgagcatttgaagaacttattggcagtctaataattctaaaagaatattttgggagctatcatgttgagctccattccttaaaagtcagtgaaatggctgggcgtggtggctcacacctgtaatctcagcattttgggaggctgaggcagaatgatcctttgtgaccagcctgggcaacatagcaagaccccatctctaccaaaaacttttaataagttagccaggcatggtggcacatgcctatagtcccagctattctagaggcttaggtgggaggattgcttgggcccaggaggtcaaggctgcagtgactcaagattgcaccaccatactccaggctgggtgacagagtgagaccctgcctctttaaaaaaaaaaaaaaaagataagggatatgcaaaattatctaggttcaaattgttttcttaaaaaatctatttcctgggaacatacactcaaaatagcttcatttgaggtggcaatcaggctctgttattgacagcatacctagaaagcaataagacagagaatttccctcacagtctgaaaactgagtttgtagaggattaggcctctaagaacccagaactggaggtgtctaggtctaaggcagctctagaaagaaaccgcagtagcagaagcttgactctttattgtggtattccaacatgaaaatgacccagtgtcttcaggtgtttgctctggtattttctctttaacagactgattcaccttctattttatgtgtttttctccactttactaatgacttaatttatgcatctttctggctcatttaatatttcttcaaggcacagaccttgtttctctacgtgcctcatgactacttctcttcttattgtttattgccttatttttgtaaatattccctagttcagatatttgagagagaatctcattgtcttttgtttaaagccacttcatgaatgttttctaatcttggataagatgcttttttaattgactttccacttttgatcaactctggcttagggaagggagaattgcttagaatgaaagttgattaggaacagccttgtgtcctttagatggggctagctctgatcctcaccaaaaacttatatggcaggtagtttgtatattacaactttcaaacttttacctccatcttatacatttctattgagctccacactagcatttcagtgacttagttaacaaccccatgtaaaggttgcatggtatctcagttcaacacgtccatacctgaagtcatgttcttcattcttaacttgtttttccagtgcttctgttgcactaaaaagcatcatgaactattaagttcctttgtcagtatctggatacctttttctttcttgtaagccttagcattatgtgtatattaagaactgagtgtgttcctccagtggatgagccttgaaacatctacgtatttcattttattgtgcttttgagttccatagagtgatctcatttgttttaagtctaaattgcagtaagtggtagtatttgttttctgaaatataataaaattggaatttacttatattagatatgtttataattttaggcagcaaaggaacagactcaagatttaatagtaaaaaccactaagcttcaatctgaaaggtaagtttttcttcatacaaccaccttttcaataatttggagattggagtcaaagaaaattatatataactccaaatcagaattaaagcagaataataaaaaacatggttcataaggtcctaaactattatattacccaatagtaacttaagcataaagacagtagtttaggagcaataaacttgacattgaggttgagagattattccttctttggaagagaggtgatgatgtatcgttattgtttgctgtggagttcagaaatgatgctttttaaaatgtaaatgttttcagatttttaatagttttattacttttttttcacaatcattgtcttttatttttaagctatgatatatcctctctggtataattaagagttaattgtataaattctccttgtagtttatacaataggtatactattggttgattgaatgaatgagtgagtgagtgaataaaggtgagtacagtctggatttgtgtaatgtgtggtgttcagtattgctaaaactcatagcaattatgctaaaactcattaactgcatctctcatgtgtggagtagtatagggggggagaagcattatattatgatgcagtatacttgtctcctgctcagtagttgggtacatcacttaaaccttttagtattctaggtatttcatcagtaatatggagatattaccactttaactgctgattttggggtaggtcagtatactatagtatagaccacaggttatcaaactatggccacaggccaaatccagctcaacacctgcttttgtaaatgcagctttattggaacacagctatggttgtgtttacatactgtctatggctgcttttaccctactgcagtagagtcgtgtggttacaacagagaccatatgtggcctacaaagcctaaaatatgtactatcaagatttttacagaaaaagtctgtgacttctgatccaactagtgtttttttgtagttcaggtcaagatcaatgggttgtaaattatgatttatcaatcattactactatttaaatcgatcatagctagccttaaaaaataaattagaatgaaataaaatagaaaatagtttgggtagctgggcatggtggtgcacacctgaagtcccagctattctggaggttgaggtgggaagatcatttgagcccaggagttcaaggttgcagtgggctatgatagtgccactgcactccagcctgggtgacagaaggagatcctgtctctaaaaaataaataagtaaaaatagtttgagtgaatattattttgtgaagcctttctttcagtttcagtaatggttttaaatggtttaatattatgggtcataatcaagagtttgaaaaacactgccctagaccaaaaatggcaagtacatgacccccaactccttagttttacatccactgatcttgacattcttttattttgagcccttaatccttcttaacacaattctcttcagactaagattgatgaatgggaaattataaagagtgcagaggtgtaaagttacttgtgtaaaaggatatcatgggtcttagggctacaaaggactcagagatcaactggaatgatccattgcagttaaaatggtaaccaatgtaacttacttttctgtcttataaaaacattgagaaaatgtgacaaaattagcaaaataaaatatatgtaccaatatcatctaaaaaatactatctttaatagcacaaaacaaagaaaacattttctttacacgtataggaagtacattattggatattggaacatgtaccttatcttagacctgtggctttcaaaccatagttcattgaacctcagggtttctttgcaagacgtagaaggataatggagttttggaggtcagattctctcaccctaattttagtgagagcagtttcacttttacttgtttaatatattaggattccatgtaagattttgtttgaaaaaagagtttgacagcaggaaaatataaaaatattgcacaattttaagactagttgaaaggtagaataccaaataaaatagtcttttgattttattcctcatgccagagaaaaatctttaaaaacaactaagtatcaaagctttataaaagcttaatcataatttcatgcatttaatcccctttttgtttactaactaccttctctttcactaaaaatccacttttacccgttgtgtgttttctacaagccaaaatgagagcaagttgatgttgtcctcagatttatagaattgcaaattgcctggatagaaattaaatttaggaagtctggccttaaattcccttttatcttgttgatattgtcattctgtattttatagctggataaatgatcatatcccccacattggtggttaattacttgatgttgacctataagtcagttttctagtacttttcagagcatcttcaatccaatccttttgtgtttaacatttaatcaaagactttagtgtatatatagacaacttacttggaaaattgtgaatgacacaaagtatggaatgttaagtgtaaggtatcaacagaatcaagcttttaagaaaaagtggggctgggcaagaggtgaataggatgataaagggtctcaaaaaatgatgtagggttgaaaaaaacagaattgtttatttagaagtataggactaagaaggacatgatggctgtcttcaaatatttgatgatctttcctgttttaaaaaaggctaaattttattatatattgctgctgagtttggaactgagttttaaaggagaaatttaggcaaattttgacttaacgataagcaagaattttctatcccttacaatttgaacaattcttcaaagctttttttttaaaatcactggaaatatttagtcttatgttaggtgtcattggagccatcttttatttcagttttcctttctggtcttttacattacgattcatgtatccacaccttatcacagtaaacataagagccaccaaggagcttgataaaatggcaagttttggcctccatcctcagagaatctgactgaaaaaagtaagcaactgtgtttttttgattaatgactcagtaaatcttgatttgggctcaggattcggcccttttaacaatatcccaggtatttttatgcagtggtccagagactataatttgaaacacctggccttagacaaaatattacttatatttttaattttttgtggaatgtccctctcccctaccttaattctctcatctcctaactggtaaactttgaaaaaacattttaactttttaaatgttaaactttatattttgagataattatagattcacatgcagttgtaagaaacaaggccgggcgccgtagctcacacctgtaatcccagcactttgggaggccgaggtgggcggatcacgaggtcaggagatcgagaccatcctggctaatgcggtgaaaccccatctctattaaaaatacaaaaaattagccgggcgtggtggcgggcacctgtagtcccagctactcaggaggctgaggcaggagaatggcatgaaccagggaggcagagcttgcagtgagctgagaacgcgccactgcactccagcctgggcgacagagcgagactccgtctcaaaaaaaaaaaaaaagaaaagaaaagaaacaatacagagatccaaggtagcctttaccttgtttctgccaaaggtaacattttacagaactatagtatggtaccacaactaggataatgaccttgatactatctacctgtcttattcagattttgcagttttactcgttggtgtatttatttttatacattttatcatttgtagattcctgaatgcgccaccatagtcacgatatagtacacagttccatcaccacaaatagtgtcctgttggtgggtggacagtgtgagaaaagttgcagactaagcccatgtgggagatggttgactctgcaaagcagccagctctgtgaggaaaggcagtgttaaatttctttatcagaattaagcctgtgccttcaccataaaattagattgcattttataacagttcttttgaaagaaaagtttcctagaaaaacacattccctgttagagaccttgacattaatttttctctaagttaatgctgaacacaaaaacaagcattactttaattgaaaattgtgattaaaactaagaggataacagatcaataatcctgtatgcaaagcctttttaaacttttcctgttctcagttaaatctttttgttttaatttttagtgtaataggtattacagttgtttgcaactaatcgttgatttgattgtctctgtttctcctaaactgtgagctccttgagaaaaatgacaatttcttattctcctttttgtatttgcagtgcctgctattttacagattcaataaataatttttgagtaaatgaatatggaaagcaactataatgttaggaaaggaacataaaactgaaaaataagcattgtattggagcttgtaatatggggctctaaataatgtatataggagacaatattagaacattgtgcttctgttcatgtgttctcaaaactatttaagcaaggtttatgtttattattttagtaagcctgtggaagtgttttggcctgatatgcttttgggaagtgaaaatttatgacattctggtatcccaagagctatagatatgatgtgccaagtgaacgtttgtgtgaatgtattttaggaaaattgcaaggcagaaattatgataacaggtctctgggggctggcagggagttgttttttcattttaaaatatctttttaacaagaaactttgttaaacaagcagttagctttagaaatagaaatctgtttctatatgggattatttgaataatacgatacttttattcagacaaatgtatgaatgatatgaatatttttccaactgagtgagaaggaagtcagtcgtcaggacagctgagatgctctaatagataaagcttaatgtagaattttattcacaggactgcaggttagcatttccccttaatagttcattggtagtcagacgatgggcttcactgataatcaggaaagactatatgtacatgaacatacctttgtatttttaaaatactactaaaatcactattatatttttattatctcttataaaggcccaccagccagaattctctctggactcagaaaaataatctctggagaatgtttatgtgtgtgtatttttttaagttcagtatgttaaaatggaaagaatataggacttaagacaaaaatctgaatcttaatcgaaaccttgggtaagagattattagatttttgattttgtacagttatttcttaacctcccttaacctaagtttctatgtctgaaagaaggaaggggaaaatatctatgtcatggggtttttgagataactaaattatttacgtaagttgctgaagacactgcatggcatacattaaagactgttgcccctccctagtcctccccttttattagacaaagaaatctatgtcactcatcttatttctatttttgctctgtcatctaggaagcttagagctattttgtgcttaattgcaatagctttcctcagatgtatgatttactttctcagcctttccctttatttcttactattttagtttttaatagttttaatttatttttattgcattgtaaactactttaactcaggttttgaaattggtagcataaaaatataaaactttatcttgcataaatggttttatattgcatgtaaaagtatattacagaagcgtatgtggcacattttctttcattacctaataaaaggttaggggaaaacaggggagcatcacatctcctttcttctttcttcttgtctcatttgtacatagtagcagctatccaaaaggaaatattgccagtgacatgcaggagcctgactgagataagctataacaactttatttcagtcacacatattggactggaaataaaaatttgggggtaaggcacagtatggcttatccatttcttgtgattatgatcatgctgtaagggaaatagtatgaggaaaaatttagaaataatctttggtttaagtattttaaaagttgggtttggagatggtatggatttttttaaatgaaaattttgtctgatcaaattttccccaccaatgaaaaagagcttttttttgcgtaacattttttccccaccaatacaaaagagcttttttttttcttcctttttttttgtgggcacgcttcatttaaagtggctattgctgtttatttcctgatttaactacatttatcaaccaggtagactttttctatattcttattcattctacctggaattccatttcccaaaattaatttgttgaaaactcatttgtcattttaggttccctgttgtttatgcccatcatatatttcaaaatattttacaaaacttaagaattttaggctatcatgtatgtgtatgtttgtgtcacacatgcatgtacatgttccttgagaatgtatatatgtatgtacctatatatgtttcaaagaaagtcttgcttactttaaaaaatacttcagcttataggaaatttatttcacctttgtactttacagttttattatatattttccatgttcagccaggaacctttactcagtcaccagaaaaaaaaataattagttccttctttgtactcccacaacacattattcttctagcacttattttctgccctatgatttctcaacagtgctggacgttatggtctttgactattttaactggatagcaaaggcagtgtattaatgctctttgtacccactcctttctacacagaaaacttttcaactgaatatgtctacatggttactttaacattttaaatagttacagctgacattgcctgttaatatttgagactcttactttataagagtaatagcaagtgtgcatatatacttaactaaatgttattaaggagtggaaagtatcaagctggaagaatgtattagatgccttttaagctgtattttgtacagttataataatacatgtaattgtaattcaaaaggtagatccttttttgtttattataaaaacatctttgttgagatataattcacatatcataaaattaaagtatatagtttattggttttagtatattcagagttgtgcaatcatcattatgatctgaattacaacattttcaccatcccagaaagaaaactcctgaccattagtagttatccagccttagtgaaccattaacctactttctgcctctctaaatttgcctattctgaatctttcatgcaaataagatcatacagtatgtggccctttttgactagctttttccacatagataaacacttttaagattcatccatgttactttaaccttttttatggctgaatagtattccattgtatagcaacaccacattttgttcacccgctcactagttgatagacatttgggttatttccactatttgactattgcaaataatgctggctgtaaatatttgtttacaagtttttgtgtgggcatgttttattcctcttaggtatatatttaggggtagaattgctgaatcatatatgataactctttaagtgtttgaggaactgccacactgttttccgaagaagctgcacagttttacatttccaaaagcagcatatgaggattccagtttctgtacatctttgtttttaatctgtcattttgatgatagccatgctactgggtgtgaagtactactcattgtggtttagatttgcattttcctaatgactaatgatgtcaagcatcttttttttgcttattggtatttgcatattttctttggagaaatgtctatttacgtcctttacccattttttaatttaggttatttgtgtttttatttattggttgtaaaagttctttatatgttctggatataggtttgttaacagatacattatttgcagccattttctcccattttttgggttatcttcacattcgtgatatcatttatagcacattttaaattttgatgtagctcgttttatcttttttgtcatttgtatgtgctttatttttcaatgtatttttgtattgaagttattttatctatttgttttaaaatactaagataaaaatttagaaatttatcaggttttgaaatcatggcatggtactggaaatgctgacaagaaaacaacctcattacaggattttatctctattgagttttaaccagtctttcaaaaacgtttaactttcagtttgatactttataaaaacttaaaatgaaaagtttcttctttttttctattttagaaccaaaaaaaattatagaaatactttttcttaaggattgtaaatgataagcagattctttaagatcctgtcaaacaggttatttcacttatctttccatcatatgaattaggtaaaaggaatcttttaagtgtaaaaaactgccttttctttcttaaatttttttgacataatgttaatataaatctattgtataaaatttaaggaaaactaaaatcatatataactctaccactcagatagaaccacaattaatattttggtatatttccttccagagtgagtatgtgtgtgtattgttaatattttacttttttcccttaatattttatgttcattttcctatgattttttatatcaagaggatcatttttggaagtgtcctgaaatataatgcctaaatttttctcaaaaaagattatcacaatttctacttccattctgtctattttattaaacccttatcagcattagatatcatctttaaaaactttgccaatgtagatgaaaaatattatcacaccattttattttttatttttatttttaattttttttaaattatactttaagttctagggtacatgtgtacaacgtgcaggtttgttacatatgtatacacgtgccatgttggtgtgctgcacccattaactcgtcatttacattaggtatatctccaaatgctatccctcccccctccccctaccccacgacaggccccggtatcacaccatttaatttacatatcatcgaatagtgatgaatcgacatgtttctcattttgttttgccatttatatttctttactttttttgttttggtttatatcttatgtccatttaaaaaattatttcgaaattatttggtgtaggtgaacctagaggtagaattaagatacgacagagataagttttcaagaaaaagaaaagtaccacaggattcataaatcatgttctgggctgatttgaaggaatcatgaaaattaagtagtccgtttattttaaatacttaggcagtatacgactggacatactgaaaattgatgtacatgtgtttatatacagtaattcccaaccttgtctatggttttgctttgtgtggtttccattacttatggtcaactgcagtctgaaagtaataaatggagaatttcagaaataagcaatttgtaagctttaaattatgtaccattttgagtagcatgatgaaatctcaagtggttggctcccactttggtgggacatcagtcatccctttttctaatgtgtgatgctatatacaccaccactcagtagtcacttagtagccgtctcagttatcagattgaaaaacagtacgtgtaggatttggtaccgtcagcagtttcaggcatccactggagggtcttggactatatcccccgaggataaggggggaccattgtaattacttcttaaaaataagtggggattcctatacatactttctcgcaactttttatacctataaaatgccttatggatcattttgttagtacatatagatctacctcagtttgatctattatgtatttttccatagtgtatatttcacatattattatttatttatataatatacagtgattgcacaaacataatcttaaatacgctagaagttataatttatatgttatgttaatatttatctcctatactttttacttagacattgaaagccctctaaaagttccatatgttgatgtaaagtaaggacaaggtctgtgtcataagtgccttttatcacactcgtctctggcataggccttatacattgtgagtctccaataatgttatttgaatgagtgaatattcccaaaccaaatcactggaccatctaacaataacttcctgtcagaatggttgtgaaaatttacctggaaagaatacatgtggtaaaactagagtaatatgataataaaaaatatattagaatttattgtcactacttttaaagttaccatcttgatatattaaactcttgttttagtactgtgcccattataaaaatatttttgcaccatctcttttgtagctatatatagagcctgtgtttctgtctttatctcatgattgatttttagatccacattatttggaatgaattgtaatgattaaggggtatgatcaaggtgggtagcatttgttttggttacaacaaaatgaaactataaactaaagagacaaattttcctttgtgcctaataaattgattctaaagatagatccaaaaaagctcccaaaaacattttatttcacatggttaatttgcatagtctcaaggaatttgatgaaattttataattactttaaattcttaatgataatgactggaacttttaaaaatataaaacaaaacctgttaaggtaactctttaagcttttaaaaattcatttttaatttataattgacatataatgattatatatatttatggggtacaatgtaatgtttcaaggtaattaccatatctatcactttaaacatttatcatttctttgtggtgacaatattcaaactcttcgctatcttgaaataccactgcattgttatttgctgtagtcaccctagtttgtaatagaacagtagaacttactcttcctaactgtaactttgtactcgttgaccaatctcttcctgtccccttctccccactatcttccccaacctctgataaccatgatctctcaccatacataaaaataaactctaaatggattaaagagtaaactatacgaccccaagttgtataactaccagaaaaaaaataggagaattgtttcatgaaattggactgggcaagaattttttgaataagacctcaaaagcacaggcaacaaagcaaaaataagataaatattaagataacttttagatatcaataataagatgattaagaacatgacatttaaatctgtgtatattcaattaggtgatttatcatttgaaataaacagatctttgctgccacctggaggatttttgcttgtaaatttctttattcagtaggagcattagcattcaactttgaatttaaaacctccatcccaaaggtgcaaataaaacagaggtggcagatgcattgtaccatctatacaaatagtgtttatgtttatctttgttcattcttatttgaattttgtttaattgtggaatattactattctctgaatattgctagtgaaatacttttataactttatttatatattttcagttctgagatacagaaaccaggaatgttgagtttctgttcaagtagtttgtgttcctaacttgcctgtgggtattgattcttctcagtcccataggtccttgagtgtgcctttttccgtcagctagtttagataggttgcactcatataatttaaaaggttgtttttattactatattttgtagaaaaagtggggaagaccaaagtggataagtgactagcaatttatggagaattaataaaggagttcttctataacataaaataaactaataaatttgatttttgatatgtacgtcatgtgaaaacttaaaaggcttaggaattgttttagtgactgaaaagaaattggttgaaaacaggaacatatttctctcttataaaagcatctagcaaactgcaaggtgaactatttaagtacttgtaagtggctgcaaatttgtaatgcagggaccatgcatggacttatttgttcttttgcgtaatgatcaactccatttattgtgtgcaagtatctgaaatagaacaatattagctaattttatcacctacatgtctgataaaattctaatatttgaggcagaaacaagacttttgaaaatattgagaacttttcatacctttgttttaaaaatttattatgtctgagatagaatttgttttaaagctatgcaactgtgtaagatgcttgatttttattgcttgttttgaaaattacagccaaaaattagagataagagctcaagttgcagatgccttcttatccaagttccaactgacttctgatgaaatgagtcttctccgaggtacaagagaaggacccattactgaggtatcctggctttctgttataatcatttaaagtttagtagttacagatattagagagaaattgcttttttgaagctttattttcccattaaaaaaagtttcatctgagaatatttttatgtttggaaatttaagatgtgtattttaattatatttttcaaagtaatacatgtactttttaaaaagagtcaaagttataaaaagaaaatctatgtcacctattttactcttcctcacctctaggtcttttgtcaaccattttcaatgttattaattgcttcttttgtaaattctatattctagatctatagttaaaaagaatatgctttgattatctatgttaactattttctattgattctctattgtgaaatgtgaggatttagccttctacccactctgtctcctcccccaacacagatagtacacacatatgttctctttatctccttcatacatcatagtacagttagaccacattttctattttcttttcctttttttttgagacagggtctcgctctgtcaacctggctggagtgcagtagcacgaacacagctcactgcagcctcaacctcccaggctcaagtgatcctctcatctcagcctcccaggtagctagggtatccaggcatgcaccaccactcctggctgattttttaattttaatttttagtagagataggatctcactgtgttgcccaggctggtcttaaactcctgagctcaagcgatgtgcctacctcggcctcccaaagtgctgggactataggtctgagccatagtacctacccacacatttttcattttcattacagtgacattacagtgattgcatgttctttcttttataactttgtgtctttccttgggttagaaatcacttgttttttcatctaattaattttttaagctattccattttttccaaactggctgacagaattatataacctctcaaaatgttaaataacaagaaaaagtttcgtttctttttttttccttgaagacattcaatttttccagaaaggaatcttttggtcttctcgctgggaagaactgtaaacttaagcctatcgtcatcattgtgggatcagagggcaagaagggttcttgaggtggggaagggttctcactgagtgtctctgagtaggtatcacttttactggcttggctaaaatggaaccagtcatttgggtgtagagaggtaaataggtgagagaattaatagagatattatgtattagtatgtactgccctcatgttttgaggaactttgcacatatgaaatatttgacatatcattttttctccccttggtagaaattagaaaatgagggttattattattattattattttaagttttattcatcaaagaaaaataacacatccgttatttttcgtgggtggaacactatttgtggcactctgaaacctaagcctccagtacatttaaatatcaatcaacagtttggcatctgtcacctcctatatatttaactttgcattctactcttggacgagggagcaataatgagtatacaacagatacataaaacatcatcttcagcaataagaatgccaggcttaagtaataaggtgtgtaatacacaatactttttttcatgtagtaatttttagttttgcatttctcactagactacgtacacttcttgaggacagggatttttgtctttataaattttattttcctggcaactgtcaacactatttggcacatagtagaaactgaattaatatattaatatgtcttaaaatgtgaataaataccagttacaccgtctatgaaaacttagagaaagttgagatcagtataggaaggcttccctaaaataggtgaaagagtttgtttgcccttggtagtgacctttcagttttaaataatgcaattttgcctgaagcatggacataaagtcacattcttaattttaaaggattttttcaaggcactgggaagagtaaaacagattcataatgatgtcaaagttctcttgcgtacaaatcaacaaacggcagggtgagtaactgctcactgaactaattgcattgctgcttatgtttccaaaattttaaagatattctagattgtttgtgaactatatagcattttgtgaaatagaagtttaatctttatttatctttagagaatggtgaagttatactctgacaggtttaggctaaaacagcagttgataaataagtgatggttaaaatgtgacatttatttaattgtagaaaattattgaaaaatcatcccataaaatgataaaaagttaatatgctgtaatatgtaatatgcaaacaaaataattaggtgcttagatgtatctgttgactaaagtttaaattataatcattaatttttttttagtttagaaattatggaacagatggccttacttcaagaaacggcttatgaaagactttaccgatgggctcaaagtaagtgatttcttttatgttgtctagattcatgaacatttgtagttgttttttaaaattttacttggtctttatttgatatattttgattttagtaatcaaacattttttaaaaataaaaatagtatttgtatttggtttttaaatttttacttggtctttgatgcattttgatttagtaatcaaaaatattttaaaaaagaaaaacaaacttcacatttgagcacactgttttttgtgtttgtatcatgagcaccagctatcagccaagcagtatgcttgattaagtgtgagaataaaacaatgaagacagtttctgccctagattattttaaagcagattaggtatctcttgttgtttacataactgtaaagttgtaagtggtaaactgattttctgctgttgctgtaacaaattattacaaactgagtggcttaaaacaacacatatttgttgccttacacttctgtaggtcagaaatcagatgtggttctcactatgctaaaatctaaatgttggtagacctgcatttgtttctgtaggctttaagggataatgtttccttgctcattcagttagttggcagaattcagttccttgtgtttgcagcactgaggtctgtgtttccttgctggctgtcactgagggtttttcccagtttctagaggctgcctgcattcttcggcttgcggccccttcctccatcttccaagccagcaatgtcaggtcattttctcatgttgattctaccctgcctcatcttctatctcatatctctaacttttctgccagccacttccattgtgaggcctgtgtgattaccttggacccacttgggtaatctgagaaaatctctccattttgaggtctactgccttaatttcatttacaaagtcccttttgccatgtaaggtaacatattcacagtttccagggattaggatgcagacatctttggagggccattattttgcctaccaggaatgctttatttgctttagttttgtttgaaaatgtttcaatagattttttgcagaatagcctgttaaaaccagagaagatatttaaaacaagcaagcatggaacaggagcacatattttaataggtgttaccaactgactgttggaaggggttggaattaaatttggttaaccagctactcctgtactatgctgcgcaaatggaattctctgatctggttggttaagtctttatctctaaaacctgtttgtttttctacctctctccttctttacattgtttgcttccatctggagtgttgtctgcctttctctcattgcatctcattgtatttttttcatgtatgtcttatctcactagttttctacttcctcaaaggcatggacattgactcaaatttttttgtgctcccgcaacatcttacatagtggttcccaactgtgggctctgtcttgtggagactatgaagtcattttaaggtgtcttcaattctctatgcatattttgttttcagtcagtgcatgctagaaagtatactgctagtgtgaagtccttgtgtaccaaaggttgggaatttctgagaagttctaaattctttgaatatactaggcacttgtgagcattttatagataaaattagaataataaagaaaagttggtgtagaaatttttaagagtttaaaattcaaactcttttgaaattatatcactatatattagttaaccacattaacaattttagcaaactgtttaaagattgcttcccagcgaaggaactgataatatctttttagtactcctccctgcctccctaatactgtcatgtatatggcagttattaggaaatacttgttcactggttggtttcttcaggactctatagtgttttataataataaaatacagctttggggcatacctgatagcatatgtggtcatttaaagttatataactacttaagcttaactttttagtttggttgacagcataaattcatttttgattggtgtattctctaggtttttctgaggatttttttttatggggtgtttgccatagaatttagactcctggaatgcaacagacataataaacatctaagctgaatttaacaaaagttataatgttaattatttttcaggtgaatgcagaacattgacacaagaatcatgtgacgtatctccagtattgacacaggcaatggaagccctgcaggacagacctgtcttatataagttggtgactttttcttaattaaaaatgaaagcctacttttcttttgatatcttactttaaattttagtattatcaaaagcgtatataatagtttgagtaatatttataataatttacaacaatactgttcaccttaacttgaatttgtttcatggggtatcagcttatttgaattttacatactatagaatacaatatggaaagagaaaccaaagtgtctctgtatctagactacctcttacttatatagaggttcagtgacttttcccctgtcgtctcattaactcccttagaattgtaagtaactaaaactcctgtatgaatacttccctacagagactgaagtcatatcagtactgagaaatatggttatgcagagatgaaaaaagaatatttaatatcaaggtaatctgttaataggatttaggaggagagggcccaggtctttgatcctgtaattgatgccaaacaagagctatgtggtaatgttttggataagaatttaatgcattttgtatttgttgatatgttttttattattttatattttaattttattcttttaatttttataaaataaaaggtaaatactttctttaatgcctggagtagtattagcataagctttaggtagatgtaggggttgatgatattaataattctgaaaacaggaaacgaggggactcttaccaaggtagtgcatcctgctttgaatcatccctttcagaatctgtttatactatttttagaggacctccccattactttctgattggaacactacttatcctatcatcaggtcacagaacacaaatgctgaacagctgtgtaaaataataacaccccagtgttacttactgagtactatgtgttaagcaccattttaaattctagaaacacaacgtcagtaaagcactgccctcaaactgctttattttatggaaccagagataaacaaacgcattttaattgaatacactaattgatagtctagaagtcatgtgccagatgctgtgtggctcaagtattctggtgtaggggaaagagatgagcatcagtgaaagtttcctaaggaattaggtataaagtgagttctgaaggctgaataggcattttcctagaagtaaaggaagaacagtttgcaggttgagggaacagtaatgcaaagatatacattgagagataatgcacctttgggaaattaattgtaaaagcttgcactggctattgaattaggagcaacagctggatcataatagccctgaatgttgtgcatatacataagataagttaatgtttaccattgatcagcagcttaacagtttattcctgctttaaaatttctttcccaactttttcactttaacatattgacattaattatgagtcttttagcacttaaaacatttggcgtttgattttaacagctgttgcattgtctacagattaatatttattcacaaggttaatcttttatgtattaaaaaaaaaaagcctttctgtgttttgggcacctttgtttgttttcaacagctgacttctgccatgcaaataaattttcactgagttatagttctttatcaaaacttggaaaggagcaatattaaatggctataaggtgggttcttgagtcaaatttctttgagaagtccgtgtacctttataagcttgtttccttagctgtaaaatgaggataataatagtgcctattttacagggttgatgtgaagattaagttagattgttcacttaaggcacttagtgtaatgcttggtacatcactaaattttagatattatttttattttgagaggagatgactagaaagttttcaactaaggagggatgtatctgagggctacatggcaatctgggaaaaagcttgaaagataaagaatggaactataataggcaaagaaggtttatctgtgaagggcatatgctaagaagcagggggcagtaatggcaatttggaagatttttttttttttttttttttttttgagacggagtctagctgtcgcccaggctggagtgcagtgacgcaatctcggctcactgcaggctccgccccctggggttcacgccattctcctgcctcagcctcccgagtagctgggactacaggcgcccgccacctcgcccggctaattttttgtattttttagtagagacggggtttcaccgtgttagccaggatggtctcgatctcctgacctcgtgatccacccgcctcggcctcccaaagtgctgggattacaggcgtgagccaccgcgcctggccaatttggaagattttaagacacatttagaagttgagtaggaaagtaagtttttaagaccagatgattagaacaagatgaatgctaaaaaagagaaaattggcctttcattaagtaattattttcaaagtggtagtttccttacatttagggaaaacttaataatgtatcatgttaaccaccagatggcactatatgaacttaataagtaatgtataaaagtttcactgtccattattgtgtctcaaataatgtaagtattatatacaagaaaaatgtcaattattgaaatccgtggggaaagttgccatactcagtgtttcttatgtggtgtataactggaatgctaatgcattattgacttttaataataaatcatgtacaattataaatgaagtgaaaaaatttgataatttattttctttggtaagcctttagaatataagttattttaaaatgtagtaatacatacaatgctgatttttcttccttctttatgtatttgttgtgtttcaaagaggcacttctttactattatcttttaatttgctttttgataaaaatttttcttcttttaatttgctttttgaccagaatttctttaactgtagctaaacacaatttttaaaatgagacttttaattttaacttgaggtatttgagaatatttacataatttgaacattcactctgaaaaagctccattttgatttttgattattgttggaagaatgtctgattttggtcaaagactttttcttctgtctctgggaaggatgtttcatgtctaaagatattgaaggttcacgtggcttatgctgtttttgctttaaattatatttgttctataggaggattgacattaatattaatgtttattgatattttatagtattgaacagatgaaattccagtgtttgccaggcttggtaatttaccccctatttaaaatacactggattttaagattcactggattctgttacagctgtcgtcccagtggacagtcctagaaacaaattatgctgtttatttttaatatagttagtagggtcttgggaatgaggattagctatatatacttaaaaagttaaacgtttgtgaattttatgctgtgataagcagtcataagttcattatttcagagaatcaggtgatcatttaaaagaaggcattcttcacactaaatggattaataatttaagagcatgagggaaaaaatagcaatgagcattttggttctaatttgtttaaaaaatagtaaatgcaaggcaattatgcaatttagcaaaacttagctggatattgcacttccccttttctgtagtatgtcaccacagggaatctcaaaaccatttctttttaatggaagacaaacccacaaagaaccatagtctggttaatagtaaacagtcctcaaaaaaggttcatattcctaaatatttatagctatttgccagttctacagactttctctttgatttggaaataaaccgtctttcacatgtttaccaaaatgtggatttttcatccaattaacagcatatgaaagaaagctatgtagcctaagatattaattattttgggtatcttgggaagttttggtaatttttgtttatatataggttattgacataattcttaaaatttagtatggtagaatactgtttagagatttaaaagttagtctagaatctgctgacatcaagactgctaaaatatattttgtttttctttatacttttaaaatggaaagaactttcaattgagggatggatgtcaggaatggtggtgataatggaaaacaaggctgagtcaagtcaaagaaatgggcactccagagagctccaggccatttttataaattgaatcccaaattgtcctattccccagttaaaagctttccttccctaccagttccttcaccttagaaagcctttccatgccttttcaattataataggtgacttcttaatacatgttttttaaaaaggtatttgcttgtatatgtgtttggtcagtaaatttaaggaacatctgttatgtctaatattggagtcaaaataagcttttaaagatggatagcaatttttggagcaaattttggtgatagattgtgatagtatgtgtaaagaagacttttttaatgtagaagagaaaaatgtcaattttgggattgcagaattcttttattttttctgagacagggtcttgctctgtggctcaggctggagtatagtggagcagtcactgctaactgcagcctgaacctcacgggctcaagtgatccccctacctcagccttccgagtagctgggactataggcatgcaccaccatgcctggctattttttttttttaataatgagaaagggtttcattattttgcccaggctggtctcaaactcctgggctccagtgaccaccttcctcggcctcctaaagtgctaggattgcaggtgtgaaccaccgcacccagccttggatttgcagagttctaattataatcagtttttgagaactgttatggctttacgtaaaacagtagagcatcatgttttagactgcaaatatgtatactgaaatataccgaaacctagtatagtgaatatactgaaacctaaaaagttaagtcttcccaccttggcttgattttcctacttttactaagtccattgctttatcccttattactgctgcctctgctttagtcccaaatcccagcattgtttcttaggaggggtaaaagtttttactttttgattgaattttcaatgagctgaagttatctcttaaatatttttttcttgtttgaaagcaatgttgcttgaccgaatatctaaaggagctttaagtgctttttaagtacttggttgtctcagaaattgcgtgaatagtctgatatagccactagaaacaaccccaaccattttttatataacttgtttcttctagatataccttagatgaatttggaacagccagaagaagtacagttgttcgtggatttattgatgcgctcacaagagggggccccggaggtacacctagaccaattgaaatgcattctcatgaccctttgaggtatagtaatcagacagcagaagaggagttgatgtttttccaaaggaaatcttcattaacatttagttttcattaggtatgtaggagatatgttggcttggctccatcaagctactgcttctgaaaaggaacaccttgaagctctcttaaagcatgtaactacacaaggtgggtccaccaattgtattgctaatgcctaaatatagaaaataacacaagcatctctgtttctgttcttgttgccatcttcttcacttagataaacaccttgatggtacaataagcatcctgattactctttctcttctctagattctccctcattctgctaatagactttctcttccatcacctttgtcctgtcactcaactgttcagttttatagtgaaacctagtgacctttcatatcaaacctagactcctctgtgtcacttttaagaaatttctggaatatttagcatacattttctcaaatcctctgcatgacactttaaaggtacagggtgatattatcttaattttatctgtgtgtaaacaggctgagtgacttgttttaggtctttaagctactaattctttcatttctgctacccagcctcttttttcattctcatggcactgttttaaaattttaagacaattatcatatctgttagtatgtttctgcattgctataaaggaacacctgaagattggtaacctataaagaggtttaatttgactcacggttctgcaggcagtagaggaagcatgatgccaacatctgcttctggtgaaggcctcaggaagcatagagtcatggtggaaggcaaaaggggaagagccagcatgtcacatggtgattgagggagcaagacagagagatgggagagatggggaggtgccacacacttttaagcaacgctgactattgtgaggacagcaccaagccattcatgagagatgcactcccatagcccaaacatctcccacaggcccccacctccgacattggggattacatttcaacttgaatttagaggggacaaacatccaaactacatcaccatatgtactaaatgtacttaaaatttttgtcttgatgtcaaggaagaaaaataactgtagttgagagttgctgatgtcttgtttacagaattccaaatcttcttagttgtgattacctaaagaggcctgttttagagtttgagggtttagtgtatgattttaaagtgttctatttttggtaggaagttaagagagacactgtggcttggtatcacttgactattttacatagctcagccacacatctctgtggttcacattatctgcaagatgagtcagtgttacaaattggtggtaatactaactttatagcttctaactcttcagtatcaagattagactcagcatatatgttagattggcacaaagtgtgcatcgttaggttctctttctgttattattctccttacccagtttaaataaatgtgtttccttaaagatgttttagaaaagtataaggcagtattaaggaagtaaatagactgtagttagttgaagtaggttattctacatgaatgacttcaatcttctgggcctcagtttttccatctgtgaaaatgaaggtgattacaagcagtaaatgtcaaatacccagtacagagtttgataaatagttggtgttttgaaaataccagtttttctgaaagatttcaaggtatatttttcatctttataccctcagtgtatgtgctaagcagcactgcctggaacaagatgtttgtaaaacaaatgctaatacatcttggcatcacttcattcaattaatacatttcaccctctttttttcctctgtcttataactttaatctttttcacaaagaaatatttattttattaactcaaagtcagatgaattaacaaggctttctagacacattaggtattatcacaattaatatgttaacacaattagtaatgtcccaagagatatcaaacttactaaaatattgttatggttattttaaaagtcattagtgccattaattatatgtattatatattatttgttagttttttgaacttatatgaagcaaagtataatatggaaacaaatattaattatgtagtcattaattttaggtgttgaagaaaatattcaagaagttgttgggcatatcactgaaggtgtgtgcaggcctctaaaggtaaaatattttgtttttacatatgctatatggtacctgcttaaattattaccttatttatagaaacttaagaaactgataccagctcaaatacaatctataattttttcaaattagcacactaatgtagactaataagaaacattttaaaataataattgccagttttctctctgagaaagaaaattggaaatatttgtagtttgcatatattgacctattttttacagattatatttcctgtagtaatttttcttattcaattgagaaaaaaatctattaaatttaaacagcgaatctatgaactcttaacagagagatttactaagaatattttgtttacttgattgcttcaagcatagaagagtttttgcttgtcatagcaataaataatgattaatccaaggataaaataatgtgtattggtattatcatcaatactgtttatagtgcaaggaacagaatttggaatcaaatttgagttagaattcccatattgccacttaattgtgtttacttattgcatccgcttaactcttctgcacctgaattatgctctggtgggacctgtatattaaaacacctatcatccagggttgttgtgaggatgactgtgtagatgaagtacatagtttatgacactaagtatttagcagatggtaaatacctttattttcctttattaatatttagagaatacttggcaattgttggtttacttttccttgtaaaccaacttcattgattgactttaatttcatacatagaaattgaaatccagaagtttagtaattaatttttcaagaaatgaactttaaaattaattttattttatttctaaggtttttgtttttttggtatatgcttcaggcaaggaaatctcagatgacacacttggtgacaattgattatattgacaaatttaactgttactctaacttgatctcataggacctaactgtatattcagtaaataaatggctaagtatcttgaaattattttacttatttctcccaaatgaaatatttacttgtcatagtttgatgtagacatatataacttatataaatgttgtttattttgtatactggcagttactggaaaggtagaagaagaggaggaataaaatgaaatttattttgctatgcttttatacctttttataacttcatatagttaaattaaactcctagtcactttgataagtaaattttactttatctgccttaccttccccccttccttgcttatgtaattatgtttctttttacaatttttctaatttttgtgggtacatagtaggtgtatgcttttccttttctttttaaaaagtaattttataaatactataattttagaatctaagggttataatggacttttcagtttcctgtcctggtttgagtaagaattattatattaaaaatgtttaaactaatccagccacttgtataaagactttatatactgaagtctgcctttgttttaaaatgtacttagaaattctcacttcatcttcctttaatgtacatacccagaaagatctttatggcaattgtaggacattattgtgatctgctggcaaatttaaatgtaagatgccaaaggtaaagaagacactagtaagcagacaagcatctttttgttgtaaaatgaagaaaaattccttttctgaaatggcagaaacttcaaatctttccatatgatgataatatgtattgcatccagagaatatttagcaggtgttcacaatagttacgtatcaaattagcttgatagtgatatgtaatccagcaactctcataccttcccttccttatatactgatagacagtgttacagtattttaagaattttttttctgtatgaccttatttgagtatcttatgttttcagtgagatagttgttagttgaggaaaaaaatttcgactttaattatttttttttgcaattataattctgaaattttctagtgatcaatctgctcttgtaatcccactcatacaaaatttcttcttcctaattgataagcaactaaactttttctaatgacatatgatattggatgttatggctacttttctgtccatcattattctttgtagatatgaattttttttggaataagagattttgatttttagaaacataaaaggttatagtggtaatgggagataatccttgagaaactatatatttgatttattctaccttgtttaatcttttctttgtcttagtaaagtgaaacatcataggtagtagattaaatatttgtaaatgtatgcattaagataagatctgtaaacctattgccagtttaaagaatctgtgctctaagtttaagattgcatatgttgtgtagggggtaccgtggctcatcagcatcaaccctattactttgtacatgtctttattccaaaactgtagctagaaagaccagaactaatatattaaattttttttttaagcccatgggtataaaatccttcttttatgtgaatgttttagattgctgagagattaccagctatcatttgaattttctcttttaataaaaactttagtgtagtgtatgctacagaccttagattatggtgggttctatgaaagcaggtatatgtaaaagatcaatgacatggaaaataaagctgaatattgtacacaatatagtcattggaccctcagattgaggtatacataggaacagatgtctaccctgagcagctgtctgtgatattaaggtaaaataggtttgtcatcatcttttttagtcctcccttcttcctgtgtccccttcatgaacacaaacccactctctttctcttgctctcgcttttgctctagctttctctctggccttggagaggagagccactgttctgtcttttagctcttccctaccttctctgctgtcagggtgcctgaagctcattttgctacttttaatatctctgcctttatggttgatgctgcttctcgtaatgcagttaggatttattgagtgcttatgatgtgccagggtctgttccaacatactttatatctgagccattattcccgttgctgctttccagctctgctaatgatttttccctccactgtcatcacagtgataatttccagtcagttgctgctaccaccactcctttaagtctctttgacctttttttactttttacttttcgtttctcttgtcctttgttgtttctcctgtgactgttgggttttgctgaaaatggttaccctcttatatagctctcataagacagagtgtttatttctgtgtggcaaacaaagcattcttggtgtattatttgtcagtctcctgattttccagcctttctctgttgtattttgtattgtagctgttgtattctttattgccactttccctcaaaacctttatattcatggagagagttggaaattgtttttgttttttcttcctttctccctcctttccctctttgcttttcctttctttctttctctcccctcttttctctctttcttaagggagtcagaactaagaatattttcttgatgcctcaaaattctggaaggcagctggccggatagctgagatgttgtttaaaatctgctagtaaagagctgtttgcctacaactaacattttttatattttgctgtaataattatattaaaattaagaaaatatcacttttattgatgtaatgtataatttaagtcactgttaaggccttgatttaaaaataaatcatggaaaaatatattttttaagttcaaatgccattcatgatccatggtattgtgttaattagatagtctatcacctataccaacagatcaatttcataaacatattaatgtaaaggtaaattgatttctgtaatctaagaggttttcatatgcagatataaaatctcattttagcaaatcacatttgttttatgacatatgccaaaatctaaatacagagaaagttcagtttttaaaagcatatattaaacatctgttgtgtgtatactgttctaccagatgctacagagatgtaaaataggcagaagacataatgtctatactgtatttgtattagaaactagttaggaaagcaagaagatagaatgtaagcagtagcttaaggacagatacaatatttaagtaagcatttatcagtgtagtttagattgtattcattaatgagataatataaaagaaggatcagtgagggatggaatttaattagaaaagattcatatttcctaaatcttgaggcaaatcaaattaatcttgaactagatctgatttttccctggtagtcttataatttggcaaatatgttggtgctaattcaagatttgcctagttttctattctttgattaatagacaaacgatataataatttatagactggaatttattttatttttttcttgaatatttagcaataaagcattatgttttcattgataatctgttttagggatgtaacagttgccttttcaatttcatattgaaccaaattccattatatactggtgataaatctcaaatgatctcaatgtattgacatttctggtaacaactgccttgaaccaaattctgcaaataatgggtcagatttttgtagagtatatctctgttaaaatgtttgttactttaccatcttctatgacttactactcagaaattatttaggaggcattttgtgatctctgcagtaataaaattttatctttgttatgctattcataccatatgttattaatgaaaaaaagttatacttttaagaaatgtttactttcctctcacatattttaataggttcgaattgagcaagtaatagttgctgaacctggggcagttttattatataaaatttctaatctcctcaaattttatcaccatacaatcaggtaagtagaatggcaaaatgtgcttgctaaatccaatgtgatatttctttcagttagagcacagtataagatttttttttatattgtgtatagtaattatacactaagtatagactaagcgtaactagtaggacttccacaccatgtaaatcattatatgcatattatacatgctatgccttaaggtctattatttcctttctccttttttctccaagcttaactacacgcacacacacacacacacacacacacacacacacaccccttatatagcaatataagtctataatgtaagtctttattgagtcttcctgcattggtaaaagacatccaaggcaactaaagcaactataccttatactcacaatagagcatagtgaatgaaatgttctattctggatgtaaataacctaccatgtactcacaatagggcatagtgaatgaaatgttctattctggatgtaaataacctaaattctttagcatttagtttactataagtgataaaatagagtcatagctttatcttctctacataacagcaactttatctgattaggaaccacttgtcttatataaaatgtgatctttgactccaaaatatgcattcatttttgctttacttacgtgttttggtggtatacccgtgagttttattataactctcactgtaagactgttatatatgtagttatgttaaaacaatgtctttccaagccatatttttgatagtttttgtatttttccattaaataattatttaaaagttatttgttatgcagtatgccagtatcaggaatagtaggccaactgttaaaaatctaagaaggatgtaactaacattaccaggaaaggttcagggagcactagtttacagagtaccaaaaaactgtggtaaggttatcacctaccccttagtgacagagagtagccacccagaacttaacagctagggaatggatttcacatcttactagtagattttcaaacaaaactaacaagtcatagtctacaaaactgatcagagataggatttggattagtcccttaatattttagatataaacttgttgtcatcattcccataattcaaaagcaatgaattagtttcagttgtaatattatagcatcctgtaataagagaatgataaatacttagaaaacacaagggcagctgaaagctagacatagcaaatgctgtgttataaaaagatgctggtaaaataatttttaaaattgtttatttaataatgtccatgatgggactacatgaaatttattatttaaagatattgatatcttagtttctaatgtagaaaatgctggaaataaaataattcagattctgaagatgataataggtttttttaggctctgagaattataatttttctatctttgaagatgatattgaagatgacaattaaaatctttttttattgattgcatgtactttgtctacttgttcacacatttcctcatttagtcaattaaacagttgactgtatacttgtcattcttctaggtggtaaggaaacagtaattaacaaaacagagcttaaacttacattgtagtaggggagacaagcaagtacaaaataataattttaggtagtggtaagggtactgaagaaaaagcaggaaaaaggaagtagaaagtataggcagtgatcatacatgagaagatatatgtgtgtgtgactgtttttgaggccattcgatagaggtgatatttgaatatggatgtgaataatatgaaggagttgggcatgaaaagatcatggagaagagtgtccaggacaaaaatacactctggtgctgaagctaggaaaagcttgcattttggaggactagaaagaaaaccaggaattggagtgtagtgaattggaaggagtagggggagatgaaatcagaaaggtagagagaggccagctcacacaggattttgaaggcgatagtggatatttcgattttatactgagtggataagattggggaaaatgtgagggttttgagtgacctgagcagatttgtgttataaggttactctggatattctgtgaatcatgtagtgtagtgagacaaaagggaaaataaggaagatatttagaaagcagtttgtgctcctgagaagagatgatgatgtttagactagggtgatggtcttagaaatggtaaacagtagttgattttggagataatttatgtcacagccaataggacatgtatacatactagatagagtgaggtatgaggagtcaaggatgaatttttggcttttggtttgaacagctgggtgaatggtattgtttgctgagatagggaatgctggaaaggaactggttgatgggagtggtgggtaatgaagagttccgttcagttttggccttgtcagatttgatgtatctgtgaatatacaggagattttgagtgatcaaataatacagagagaaatcagggctgaagctaaaaatgtcttagttttcagaaaacagatgacacaatgccatgggagtaggtaagatcacttaagaaatgagtatagataaagaatggttgctaaggactgagtcctgggaaactccaatattttgagtcaagaagaggagaaacgacaaaactgggaaggaatagtggtgaagttggggaagaagcaggacgcatgcaagatctcaaaaaatttacctctcatacattaaaactcctaacaaaaggaagatatagaatccaggaaacagggactcgagcatgcttggattatatatcctttcctgcaaaacttttctccctggaattaataaacacttggcttttgtacttgtttactttcctatgcccttatcactattttggatccaagctatttaagagaactcaacattgcattgtctcaccatgtagtccaacaagtaatccgcctctctcctgcccctatctgatacccttcttggagccctcattcccctccagtctagatgtgttgccctttaggcctactgcaagctgcttggctgtcacactgggatttatcttcttcactagcctgttcactggcttgttttgggtatccctgattctttggtcagctctgaatagtatttacatgagtgtaatgatgtaaatattgaatagttatttaccagaactctgtgcccatggctatattaggaagcctggggaaggtgaagtttgggtgtgttgtggtggaggaggagaactgtataagagagtttaactctcatcttctacatcagggaatttgtagataatacctaaaactgaaaaatcaagtaatgggagtataggcatgttggatagaaatatggaatgaaatgtcagaagaaacatctacaattatctgtaccagttactggaacataatgagtgttcaataaacgttagtaaattctagatctgaataactgcaaagtacagctgataactccatattaaaaaaaaaaatgaatgtaaatgtatgttgagttctctccaaatttttcattaaattgtttccatttgttttcatttaatttgcttcctctgttgcttgatgtacacttttattcagagaaatacttgttttcattgcatgtgcaggcatgtgtgggaattctatccagtttattttagtatttggcatacaatatttttaactaaaatacttattgtttctttaaaatataagtattatggctactggtttagtaatttgctagtattttgctgtttgctatatatatatgcactttactaataatttacattgttttcatgaactatgtaagaatttacctaatttattttggtttcggaattgtactgaaatattacatttgcaaatattagtatttgcttttataatacatgtggtatatgatttatcagtaaacttgctgtgttttagcttactgtttagtagtatttaatgccattatattcatctttaacaatctaaaattttttaggcatggaagatgttgttatgcctttagaaattataattccttactggattacagcatattttcataaccacatgaaacttttcccctagaaggttgttaaaatcacttttagtatgtgaattaggaggaaaaaaatgggaattgttttatatacatacttgtcttagatcttggcaaaaatgggaaacctccttgaatgggtctaagaaatagccttatacaatagcaaattgaggattatggaatgtactaatgtaattagccatttcaaaatgctatcagacttttcaattagtctaaatatactgctctgtaggcagctgtataaaaattgagaaactgatttataggtgtgttattgatatagtataacagttttaattaaaagaataactcagtatttatacaatttaaatattttatcaatagagctgttgattcagtgctcttcttaaaattaaaattaactgtcttagataattgagatatatatttactctaatagaggaaaaatagagatagggttttatatatcacaaatatctgttctgacccacggttttgctaaaagagattgtgaaatattgaaaacatagtagtttgtttttattttttcatcacctaactcaaaagaaaaacaaaaatcctgatttttaaaatatgaaactagagtatttttaattcacaggttatattttacataaaaacttttatttaaatctagatccttttaaagcattctactcagttaaggaactgttttgtttcagtttctgttttgcaacctgaaatattctttgcttttagtggtattgttggaaatagtgcaactgcattattgactaccattgaagaaatgcatttgctaagcaaaaaaatattcttcaatagcttgagtcttcatgcaagtaaattaatggacaaggtatgtttgaaaaatgtaattattaaattatgtgaatgtttcacattaaagatgttttagtgatttttgtattgattgataacttttcccattacattctgtgttcttttgagttcttcctgtcaccaacaactttcattttgagatggcttactggacctaagttgatagtctttgttcctgaaacagtataacattgagttataattggagatggcatctcaggctccaattttactaccatttttttctatcacagaagttgtataattaaagcaaacttactgtatttagctgggggctaagatgacatacagattggaaaaccagaactcttacaaaatattttttccaaacagcttatatttttacccctgttgttacagttttgtccttatgaaatgtatgctcctctgagttatataattatttatgaaaacaaacaaggaaaaacatcccacaaaaaaacaaacaacaaaatcctcaaagagtcctgtaagatctaatatcttaaattgagcagggtattttggcaggaccttaaggaatagacttacaatgatcaaatccttctttatttttgtttcattattgagaacatgagtttttcaaggatgtgtcacaatcaccatgctggctttttaattgtactactctatctaataggctagctatattaggcccagattttgtaatatggtataaaatagtcagtagcaatttagtccagaatacgtggtcaatcttcactttcctaagttcagtcttcactttcctaagccttaataggagtctacttcctgacccacatgcatgactcagattcatttggaaaagcaacatgaatttgtggagctggaatatctacctttatttttcttgccttgtgtatttctgtttgcatcaacagtttactaacaatcatttctggttatatttgttattatgagttcttatttagacagaactcttctaaaataatttatacatgatacacaaacattaaacatgaacaaatatgtgctagctgttgagagtacaaggatgaacactcaacatctgttggcctcattaaggttgcttttcctttagtggaaaatgaccaaataagtctggttattatagaattctatgatttatgaaagacatgtgcctagggtatatgctagcaccaaaggaggagtatatttagcaaacttatctgtactcctttacagagaggaagctttccatagagagatgtaatggagttgaactttgaagaacaggtaggctttagataggtgaggaaaggagtgcatagaggtcatcttaaatagaagaaagaaatagaatatgctagaacatgagtatgagttacctataaaagaatttttcatttattaaaaaatatcacttgtaaagtgatgtgttttatatatataagtggggaggctaggttggaaataggaaaattaaaggagtattgaaactgtttttattcatacatgatctaagggaaagactctgggaataggcaagaggggacagattcatgaagggtaaaggtaaaatcttcaaaacttgatgactgaatgtgggttagtgagagggagtcatctagaataattcctaggctaatcacaaatatctagaatgcagaaagagggtacaatttgggagataaagatggtatcatctaagttagataagttgagtttgaggtgcctatgagagatccctctggaattggtctaatctaaaagggagtgatacatttggatttagagagttttacatataagagatagttgaattcatgggtttggatgaagtcactaggaataattttttttatgagtagagctaccaggacacagtcttgggaaacactgacgtttaagagaaggaaaaacgtcaacagtatgatgctgagagaggatggccagagaggcaggacaaaaattaggataaggttttatcagaaaagccaagagaagacagtttctagaaggagggcatggttaataatgacagatgcttttaaagagttcaagtaggaggcttgttatctttggcaatatatatgtgataggtgacctaaatgggcaattttagtcctgtggtggagataggagccaggttgtagtacgtagaaaagttcatgggtaagcatattacccaaagctttaccaattagaaaacatatgggcctcaagactgaaaatagatgcattaggcgtttgtattaaaaaatttgaaacagagcaataaaatgaagatatatggaaaggatggaattaaatttccgtgacaaattagaaaacaaaagcagaattatttgttgaaaagataaacaaaattgacaaacttctagcaagtctaatcaagaaaaaaagaaaattagaagtttttagaaattagagacaatccacagatgagaattaaaacttagagagtaccatgtgcagttttgtgctaatcatctgaaaatcagaataagatgaatgctttttaaggtgacataaattggtaaaatgtgagtcaaaaggaagtggaaagtgtgaatatacctaaggaaggaagaaaagttattaaagaacgtgttgccaggcctagttcagattatatagagaacttcattcatccttaggaggaacagataattctccagaacatgaaaaaatatggaaagcttcccagtttgttttaggtagtataacaccgacataaaaccttttaaagatagtcagtagtggaaaccatagattagtcactttttaagttttaaaacttcaaaattcagcatttatatattaaaaccaagaatggtttattacatgaatataagaatgtttcagtgttaggaaatatactaaatgagtatataaaataaattttatattctcatatttgatcacattggggaaaatcttaatattaaaacaagtcattgatgaatacttccttaaccatataaagagagataaaactaacagccaacatcataattaatattgacacactagtggttcttctatttaagtgaagaacaagaatgcttgccaatacttttaaataataaccacggtagaaagatgagataaagaaatgaattgtaaatattttaaaggaggagacattagattatttatggatgttatgatagtctattttgaagacctaggagaatcaactaaaaagctatacaaccagaaaatgaattctagtgaagtcgttggtgaaaagatcaatatacaaatgtaattaattttcttatataccagctcatgaggtgctcaataaatactggtaacatgaatggttcagttcattttctgctggcctatattccatcactatcttgccattagctttaaatctcttgcacccttgccattttaccacattcactttgcaaaaccaccttgagttaattcaatttttcaatttttcctgagctctgctaaagaaaattacatcatacagacaggaatcactaaaaattgtctccaacatcaggaaagccccccaggaggtccagcaaatactgattgtcctttggcagccactcacatttacctcacttattttcacccatttcctcaaatctaccatactacctcctactgaaaaagtgccaactcttgctaaaactggataatggacattaaaaaaaaatctttaccaacatgacgagcaaaagcgacattttgttgtttttctcatttggatttctgtgattctagtgagaatgaacattttaagatatgtttttggctgtttgtgaattgcttgttcaagtcctttgccattttcctattgggttgtcttgttcatttctgatattctttatgcattaagaatattaactccatcatatatattacagacattttctccacgttatcatttgcctttaaaatttgcctgtagtattttctgacacatcaacttttaatttttttatagttcaatagaactttttttatagtttttttcccttgggagcattccatgcttgaaagtattcccacaagaaaaaacatttagaatttaatatataataaagatagcatctattagtggggaaatgatagattgtttaatacatttatttagatgtattttcttaggtgtttctatgttttcactttatttatttttttaagcaacagggtcttactgttgttgcccaggatcgtagctcactgcagccttgaagctcaagccatccttctgcctcagccttccaagtagctgggactataggtgcatgccaccatgcccagctaatttaaatttttttttttttctgtagagacatggtctcactatgttgcccaggcttgtctcaaactactggcctcaggtgatcctcctgcctcagcctcccaaagtgcaggaattacaggtgtgagccatcacacctggccctagccctggtttcacttttgcaacaaatttttaatctactgaagtttattattgttcagactgaaaacttagtatcttattctttcccaagtggttatccatttattttattttattcccctaatagtaagtttctatatattttattagtcatgtaaaagttaaaatgaaagttgcaacaaaacaggaaaacatacagttgactcctgaacaacatgggagttatgatgctgacccctgtgaagttgaaaaaatctgcgtgtgactttcgactctcaaaatctaactgctaattagctattgactggatgccttgctaataacataagcagtcaactcattttttgttgtatgtattatacactgtattcttacaataaagtaagctagtgaaaggaaaatgttattaagaaaatcataagggagagaaaatatatctactattcattaaatggaagtgaatcatcataaaggtctttatcctcattgtcttcacattgagtaggctgaggaggaggaagaagagagactggtcttgctgtctcagagagtagcagagggagaagacaatctatgtaaatgtggacctttgtggtttaaacatgtgttgtttaagggtcatctgtaatggatagtaaaaggcaactgaaggatgacatcttccaattaaaactttgaacagaataggatgaaaatgaggaaagaaagtaattgtaatctgaatttattaattaccaatcaatattgcagcttatatgagtttatagcagtgaatgggctctgatcattattgttgttgtttttgttgtcattattactaattgaaccctggatgtttttctcagatatgaactgggccatatttagagttatttttacattagattgcgaccgtgttatgattctctttacaactcatatgttgcttgtatctacaaccatttcaggttttttgcaagaatatcttcctttcatcaaattttaatgttccataattttatattagttatatcttttacttattctgcttcttgtaaatgatttcacttcctctaaaaacactgtagctttatgaagaaaacaatatttattgtagcatgttcttcattagcaaagcacccaagtggaaatttttgttaatagaattttaagtgaatagtataattgttggaaagaatagcttttaaaataaaggtatagccagagaggaatttttaaaaatatgattgcttttgtgcttttaaaaagacatacttgggagctaattctttatctagcgtgagaaaaaggaaattcaaggacataattttattgaaagatgtaccttttccctaacaaagcagtttgaagcacttgagtattcaagtaggcatactcccttccttatcaagctctcctgaaatattcataactgcaaatctagtgaagtttaaagagaatatgcatctatactgcaaaagacacaatgttgtgtcaatttaggctagactgacattttctaaaattatttctcactatagtaatagtgcagttctaattgcaaggatatagcctgtcttaaatgaaacccatatcaagttaatagtagtcaggattgatttgcccagtcctctggagaaaaaaaaacaaaccccaaatgattctttaaataaattgtcatttaaattctaggatatggttactgctttgaatctctttttactactcatagcatagtatgtggattagcagcttgggcatcatatgggaacttactagacatgcagatatctcaggtcctgctccagacctactgaattgaattatgcattttaataagattcccaggaggttcatgtgctcattatagtttgagaggtgctgttctggttgaatagtttgagttttacattattccttacagatgattctgccaggaaaaacaaacagaaaaccaaattttttttatctgaaatgctttaatatttaaaaaaataaaagtgtgtaaaataagttgtaatttgaaattatttcaaacatgttagtttgcagtcctaaatttatcttggacaattttattgacttaaaaacttaaattccacatattgtcaattactagaatgtatgtatttagagcaaaaggaatgtatatatttatatatatgtatatacacacacacttcttttatatatatactcctttatatatatatatactcctttatatatatatatactcctttatatatatatatatatatatatttaaatatatatagagagagaatgaggaaattagtttaaaaatatgagaactttgtgtttggttggctagtctttattttttgaaagcaaatgggcgaagggccttctaagaagctacacaacagaaaattataggaccttaaatggaagatagctgaaagaataaaactaaagttggtagtgggatgaagttgtaggaacagcttttggaatttttatggtgcaacctttttatttttctctagtaaaagtcagagcacctaaactacagaagggataaaaagtaaatagtcacaagaacaatgaggacttttgtgtatagctctacacatttaaaaaaagagaggttctaatatatggaatatgaagttttcaatagcttaaatgctttttttaaaaaaattattgattgattaattgattgggtcagagtctgtctctgtcgtccaggctggagttcagtggtgtgatctcggctcactgcaacctcctcctcctgggttcaagcgattctcctgcctcagcctcccgagtagctggggttacaggcatccgccaccatctccaactaatttttgtatttttagtagagacagggtttcaccatgttggccagactggccttgatttcctggtctcaagcaatccacccacctcagcctcccaaagtgctgatattacaggcatgagccaccatgcctggcctttaaatgcttttaaatgtgaaatttttctgtatacttcaactttgtcacttagaaaatattcaaattttgaaataagtatttaataataatgacttgatgtttagtatgtacaataatataaagaagaagaagaacaaatgagctcacttttttttttttttgagacagagtctcgctctgtcaccaggctggagtgtaatgcacaatctctctgctcactgcagcttctgcctcccgggttcaagtgattctcctgcctcagcctcctgagtagctgggactacaggcatgcaccaccacacccagctaatttttgtatttttagtagagacggggtttcaccatgttggccaggatggtctctatctcttgacctcatgatccgcccgcctcagccttccaaagtgctgggattacaggcatgagccactgcacccagccaagctttatttttaactgcagatatagtacccaagtctaaagtatacagttagttgaatgtttgtatttgcatatgctcattagctatcacccagataagatataaaacatttctagcccttcagaaggcatcctctttccccttcccagtcaatatctaaccccggtgtaaactgctgtctgactactgtctcttgttttgcctgctattaacttcatgtaaatagattcatacagtgtatacttttttggccctgacttaacatatctgtaagattcatatattttgcatgttcagtagttcattttttaattgttgtgtagtaatttcattatatatattcaccacaatttactcattctgttactgatggacatttgggatgtttctagttcttggatattgtaaataaagctattattaatagtcttatacatgtgttggtggacataagtttttatttctcttgtatgtatgcccagaaatggaatatctggattataagattgattagctttactagatattgctaagtatttttccaaagtaattgtcctagatcacttcaccagaaatgtgggagtttcagttgttccacattctctccagtacgtgatgttgttagtctttttaattttaggcattgtagaaagtgtgtggtggtatttcatttgcttgtagtttgcatttttctcaagattaatggtgatgaacaatttttcatgtttattggctgctggatgtactttcttttgaagttgtcttttaaagactgttgcagagagtccttactgggttgttacctttttcttattgacttataagagttttcaaacatgtgtttggatacaagtcctttatggaataataagcatcacagatattttctatcactttttgaactgtcttttcactctcttagtcatgtattagattaacagaaattctcaatttttaattcagtcttgtataacaagcttttatttcatgattagttccttttgtgtcctgtttaagaaatctttggctatctcaaggtcatgaggacattcttctgtatttttctctaagaagcttgattattttagcttccacatttaggccttcaatccatctcaaatttttgagtatggtatgaaggtaggggtcaagtttaatttgtgtgtgtgtgtgttgtttaaattactttattttccttgctttcaatttttcttgcctttggccttgatccgtgtcgtaatgtctggtaaaatataacaatacctaataccatgttctcatagtaggtcttcaacagatgtttgatagattgaaaaactagaagagccttagaagctaatcttctcagtcatctttgtccttagctacatatgtatttcttaggttacctgagacttttatgtttttttccagttaagttgatatttaataattggttgtcttagtaccagtagtgtagttgcaggtggtttttgtgctgcgatgcaggtatagcctttcttaaattaaagattcagtctgagtttgttggggatacttatctcgggtgagcaattgatggggctccgcattagaaaggcaatatatggctcaaggagaaatcctgggctttggagtctgatagagctgtactcaaattctaacttttccaatcattatgactttcagtaagttgtcactatgtaattgagtttttactaaatgtaaaacaaagaattacggcacagtcaacgtagattaacctgccctaggtcacatagtcactaagggtgaatatatatccaggtctgcctaattgctaagcctgtgcctacttcctggtggatgttccatacataatagttccttttaacattttccttttatttatttttaatttttataaatttatgagatactaatgcagtcatgttacatttatatattatgtaatggtgaagtctgggcttttagtgtaatcatcacctgagtactgtatattgcacccagtaggtaatttctcatcccccattcccctcccaccctcccaacctgtctgagtctccattgtctattattctactctgtgtccatgtgtacacattatttagctcccacttataagaacatgcaatatttgactttgtttatttcacctaagattatggcctgaagttccactcatgttgttgcaaaagaaatgatttcattctttttcatggctgaatagtattccatggtgtgagtgtatgtgtatatatatgtgtgtgtgtatatgtgtggtgtgtgtgtatatgtgatatgtaacacatatatgtgtgtgtccacaaatatatatgtgttatatgtacacacacaccacattttctttatccagtcatctgttgatgggcacttaggttgattccgtatcttcgctattgtgcatattttcatgtggatatacacttgatccagcaccatttattgtaaaggccatccattcccactgcagtgaagtggaaatggtcataaattacatgaccatgtatgtggatttgtttggtaattgtgtattccattgatttattttagattatttatttattccattgatttcattttatttagaatcaacttgtgcatttttaaaataaaaaagctttctgaggctttgattaaatctatagatcagttgaggagaaattaatatcttaatgataccaagatttccaatttatgaatatcatatatctctccatttacttaggtctttagtttctctcactaacctttcatagtgttcaggccttgcacatctttggttagatttattcccagatattgagtggtttttttgatgcttttgaaacttatttttctctttaaattttattttacacatatgtatttctagtatagagttgattttgatcgttgattctgtttccacatacctttaaggcagtttgtttttgagtgcaagagtaagccattgaagatttggtctcacatcttcatttttgaaagcattttaaaaatatcattgggactgctgtatggagaatggaaagtgggtatggaggagcaaatttggaagaaaggagaccacttaggagactcttagagtaagtaaacctggcaaaagtggcctactatagagtagtagcataggatgatttggatcatttgcatttggaatatattttaatggtttagagataattcagtaaattaaatgagggaaatgaagaaaagaaaaaaatcaacaaatacttttcggttgttgatctgattaattggatatcattaatgcttaaatacccccatttaatgtttgtaaaataaaaagtgataactattgttcctactcccttttgtatttcatacaaactctaagttctttagaagatttttcttttttaaatagggcagtgaagacattagctggttcttttctttttttttttgacattagcttttgtttttgacgaaagaaaaattttaactttaccatataatgctaatttctgtcttttaaaaaatattaacttataaaacagcatatctaattttacttttgtttaagattacattggagcccatgagtgggcttctattaatctataattgtttctgtaattttccatgtttatcttttttttttgagaaacaaatggtaaactcaatgatattcttaaagaagtctgccttcctcctccacctgtaacatgtaagaatcaccggtttgaaaagtttaaagcatatgagtcacaaggatataaaattagctagcaaaatttcaatgtagcaaaacatttaggaagaaaggatgcgttatgtaaacttgaagaaggcctcaaataggttgtaagatactggggccattagtgctcatagacttcaatgtggtcacgatcttaagaaacagctgttaatagcaccttatcatagattccctacagaagaatctaagagctacagcatcctctctgaaaaaattaactttatagaattcaagtaaaaatatcacctatgaaaatcaaaattaacacttcggtgtagtggttataagcgtgacctttggagtcaatgcttgggtgagagtctaagctctgccccttctaagaacagtgggacctttggaaggttatttaatctgtccctactttagtttcctcatatataaaatttgatattattccttcctcctccttctcatcagtcttactcatcttctgtaaaatgggaatgatatataccttaggctcattaggattaaatgaagatcacatgtaaaatacatggtacagtttttagattattttttcacattacaaaatactcattttgaagatagaaatataaagaaagtttaaacatgactataggtaacattcagcatttttaatatttcagtcttttaaaaatatgagtgtacacacacctgtacacatgatgtgcatacagttttgtctttgtttttgtttttgagattgagtctcgctctgtggcccaggctggagtacagtggtgcaatctcacctcactacaacctccacctcctgggttcaagcgattctccagcttcagcctcccgagtggctacgattacaggtatgcgccaccatgcccagctaatttttgtatttttagtagagacggggtttcgccatattggccaggttggtctcgaactcctgacctcaggcgatctgcccgcctcggcctcccagtgctgagactacaggcgtgagtcaccatgcccagccctgatgtgtatcttgcatttttcatttaacatattattggggcttaataaaatcttaattcttttttttggaaacatctttaatactgtacttatggatcccattcttccacgtagaagccagttttagatgaattattttagttcattttccctattaaatagcatttataatgccaaaatattccctcataatactgttggaacatgtctgttgtccagaggcttattaagaaatgacttactgtttagtcccttggtatttcaaaacaattgattaaatatgtagtggtatatgtatatgttttatgttgtaactatgctgcaggaacataaattgaatgtaagtgaccatagtcaacagtttttattgatatccattatgcttaaaacattgtgaaagatagagcagttaagaagatatgtgcctgaaataaggagtctaatctgtttgaagtagacgttctcacatgtcattttagtagccttgtactttggatttaaaaacaagcaaagatgtttgcttattgtccctaagggagtatgctttgaatataaccagttattttgtatccattcattcacatgaacctacttaggttagtggaacataaccatggtataggtatttggaagtaatgtggccatgtttgcaacaaagcttacctgcccgagcaagtacttgcatgcctgctgtagatactcagcgaagtgtcatgtggccaacgtcaggttacaactctagttaagatttttgagagtttaagatcatgacaaaaatagagggaaaagtcaaacatacagaataagaaagagggaaatctttatttgtaaggcaaaagttcacattttcttcaactttctgtcagtatgtaagatttctatgaatagctcaagtcctggcataagtagcagtgataatattaacacctctttctcccagtcacatcattctgaggatgcatctgccactcacttactgatgctgactggtttccaaggaagtggagtgtgaataaacttggattttctacacagcttaaagcttataggaatttctgtattatgattattgttttacatgaagttcataaattgtttgtttctaatggttgctactacctgttttaggctctctaaataacaaagcccacttaattctagtatttggcctccacagccttatatggagatatgaaagacatagtaaagagggtctcttccctaagggagattatggttagtataaagtaagtgcaagaatgcattggagggacttcaaaagaaatatagacttggccaggtgcggtggctcacgcctgtaatcccaggactttgggaggtcaaggcgggtggatcacgaggtcaagagatcaaaaccatcctggctaacaaggtgaaaccccgtctctactaaaaatacaaaaaaattagccgggcatggtggcaggcgcctgtagtcccagctactcgggaggccaaggcaggagaatggcatgaacctgggaggtggagcttgcagtgagccgagatcatgccactgcactccagcctaggcaacagagtgagactccatctcaaaaaaaaagaaaaagaaatatagacttgtctcttacaaagtttaaccattagaaatgaattttacaaaatgaaactaaagtgacaaaagtgagctatttctcctccttagattttctttctgttattctgctacaggattttatagtcacaaagtttgtttatctgaaaaactgccataattttcacttagctttagaagtgtggttcttaccttgttgccgatctaatggatgtgtgtaaaaacacctcatagaatggcagtttgttgaatgacttgagttcaagtagcactcacttgcaatgatttaccatcaactctaactgtggcaaagtgtgactttagccttaaatttaaactccttaaagaccttatttcaagggggaaaaaaatttcctttcaactttctcccatcagtgtgtaagttttacatcattggtcttctgttttgtttggcaattaaaaatctcttgtgttaatttttgaaagtttttttttttaagatttattgcttccaagtgcaacaaaaataaaaataaataaatgggatctaattaaactaaaatgcttctgtatagccaaagaaataaccatcagaggaaacacacaacccacagagaaaatatttgcaaactacgtatctgaaaaaggactgatatccagaatagaaggaacacaaacaaatcagcaagaaaaaaacaaataatcccatcaaaaagtgggcaaatgagatgaacagccatttctcaaaagaagatatacagatggctaacaaacatatgaaaaatgctcaacatcactaatcaaggaaatgcaaattaaaaccacagtgagacaccaccttactcttgtaagaatggccattattaaaaagtgaaaaaaaaaaccatattgatgtggatatggtgaaagggaatgcttatatactgctggtgggaatgtaaattagtacaacctctatggaaaacagtaggaagatttcttaaagaactaaaagatctaccattcaatccagcaatcccactactgggtatctacccaaaggaatagtagtcattatatcaaaaagacacttgcacacatgtgtttattgcagcacggttgcagttgtaaagatatggaaccagcctaagtgcccatcaactaatcagtcgataaagaaattgcaacaacttgaatggagcaggaggccattattctaagtgaagcaactcaggaataggaagccaaaaactgtatgttcttacttgtaagtgggagctaagctatgggtacacaaaggcacacagagtgatataatgtactatggagactcagaagggggagaggatgaggagtgagggatgaaaaattacatattgggcacgatatacactacttggatgatgggtgcactaaaatctcagacttcgccacagtacaatcatccatgtaactagaaaccacttgtacaccaaaagctgttaaaatttaaaaaaaaatttttaaagatttattgcttccaaaagacactatatactcctctctctctctctctatacacacacacacacacacaaacacacacatactatatattatagtttataacctagaagagaaaattacacattaaacatttaggttcttaatcatacaaggtttgtagttctactagagctgtactcctcatctagcttccctggaggatttattagatttttttttctgtttatgaaaggtattgggaactgacacataacgtgtttgctctggtttctatagctgtctatttctatattatagctattagaatgctagcagatctttctgatttgttctaagctaaagattccactgaaaaaaatttgagtatcttcagtttatatttcttatgtatatgcatgcacatatatggaatagctttatatttaaatttttggaattatgagtatgttgatttctattaaatgtatatttatttttaaaaacaaatggaaacacaagaaaataacactcatctacatcctgtcaccctgaattgactgttattaactgcttggtagttggttgtttcttttagggggcagagatcactctattaattttgtaaaactgatatgcatatatttatacataatttaaaccatggagaagagcacaaagatgaaaatttttaaaaaaccctcttcttggaaataacattagttaactttattataatcagtttaacaacagtctggatatcatttgaagtaggaatgataaatagaatacttttgtgaagaaaagatcatattctggaggttttttttaagttcacatttatttgaatctaatgaaagaaaaggagacaaaactgaagaaactgtggaacttgaaatatgtatctcttcacccaagaaatattttccttcaattttgtaagttttggctttatgtgttttggggcttttttgttgggtgcatatatgtttataattattttattttcttgatggattgacccttttatcattatcagaatcttttatttctagtaattttgttttaaagtctgttttgtctgatattagtatattagtgtagctaatttaatctagctttctttcagttattgtttgcaacgtatatctttttatatccttgtacatctaatttatttttgtcttaaaagtgtgtctcttgaagttggcatatagttggtacatggtgtggtttttcaaattaatctgctagtctctgctttttgattgtcatgtttaatccatttacacttaatttaattgagggtagagtaggatttatgtctgcaatttgcccttttgttttctgtatgtcttaagtgatttttttttctctgtgtccctgttacttcttttacactgagtagatactttctagtctactaatttaattcccttatttaaacatatatgtatgtgggtatagggttagttatatttcctgagtggtgccctgggaattacaattagcatcttaatttataacaacatactttgaatagtatacaaaaactttgctcctacatagctccattctcctcttcctttatgccgttattaatacagttaaatcttattacattgtatgcccatcaacatagacttataattattgcctcatgcagttttcttttaaattagagttatgaacaaaaaatacattaaaactgtcttttatagttatctttgttggagtcttgaccagtgctctatttctttatgtggatcgagttactttctagtgtccagttttccttagtatgtcttgtagggcaggtatgctagtgaagaatttttgcctttatttggagtgtcttaatttcccccttactcttgaagaatagttttgctgaatttgaaatacttggttgacagtttatttcagcctgtgactatgtcatccaatatgcagacttctggcctgcatgttttctggtaagaaatcagctattgatcttgtcaaaaatccttgttcatagtgagttatttctttttagttgctttcaggattatctgtcttttgacagtttgattatgatgtgtgttactgtaggtctcttgagtttatctttcttgggggtcagttagcttcttggatgttgattaatgttttttaaagtcaaaattggtaatctttctgtcattgtttcttcactgcctttttttctttgttctttccttctgggcttcccctttatacttatattgttaaatggtgtcttatctctgatgttctgttcattttttcaattctttttctttctatttctcagactcaataatctttaagttcctgtctttaagttcgctgattatttattccacctgctcaaatctgctgtaaggccaagcacagcagttcacacctgtaatgatagcattttgggaggctaaggcaggaggatcacttgagcccaggagtttgagaccagcctgggcaacatagcaagactaccatctctacaaaaaagaaaattagcgaggcttggtggcatgtgcctgtagtcctagctgttaatacttgggaaactgaggtgggatgatcactcgagcatgcagtgagctgtgattgcaccactgcactttatcctgagtgacagagaaagaccctgtcaaaaacaaaaaacaaaaacaaaaacaaaaccctatagttaatttttcatttcagttgtgtactttttgactccagaatttctctttggttgtattttattattcctgtctctttattgatattctttatttggtgagacattgttttcatactttagttcttcagacatgattttcttcagtctttgaacgtatctaaaatagcttgtttaaagtctttgtctagtaaatctaacatctggacttcagagaatgtttctgttgaggtgtttttctgtgcatgctgtgcatggactatattttcttgtttgcttgcatgttttatgatttttttgttcttgttgtttttatgaaggagagagtatttttggacatgcttactttgctattcctggtgatgtcacttatgtattaactttctacatgaaaccatcttataataaatgccgatatttgaaaattcttacacctttctgcctacctgccactaagatgtagtctcttacattgtcttctaagtgctatttttaaaaaatttacaaaatgttactttattaacattgtaagtattctgaaaatatttttaaagaaattcataggcacttctttttatgtatcatggtgccaccaaataaggatagtgaacttggcataccttctacttagtaagtgcaaggcatgttactcagccatgcaacaatctcatttaatatttacagagtccctctgaagctctgaaaacttaagtaacttgctgaagattacacaactagtaagtgatagatccaagatttgaacttaatgtgtttaactctagagcccaatatattaatggtaatgttatactgtttctgtgaagtgattttcaaaatgtgggacccatgggttaccttcttgagagactcctggggtgcttgttgaactgtcaattcctgaacccctaacctatacatattgaactaaaatctctgaaatttgggcctgagagtaggtgacgtttctcaattatattatagttggaatagtgctggtctatagactgcttttttcttatgatttgggctaaaaaataaaacagtaggccattttaaatccatattaaaatgtaattctacaattcaattgaacactaacttttcaaattaattttttgaattttagagtacaaggtgacatattctgagataatctgacaaagaacttttctctcactttgtgtgctgttaatatagttcaaagtaagctattgataaattataggtttctaatgtgtgagtctgtgctttataacttttacatttttttttactatgaacttacatttatacattaaaatttagtggaaaaaatataaggagtgggtaaatcatctcttgttttaggttgaactcccaccacctgatcttggaccaagttctgcactaaatcagacactcatgttgctgcgtgaagttttagcatctcacgattcttcagttgtaccattagatgctcgtcaagctgattttgtgcaggtatgttataaattcatttttaatgattgttttttgctcttctattgtacactgtgtttcaattctggaattttgtaattcatatactttgacagtctctttcttactgttaattttccatcaaatattaaaccagttatcataacttaaaaagcattgatttatgtttaatcttttcctacgtgcttctataaattggcttccttccaattagtttggcattaaatatcattaacccaagaccctatcagtgattgagaaataaagagttcattttatttttcatttgtaggttttatcatgtgtcttggatcctctcctacagatgtgtactgtatcagccagcaatttaggcacagctgacatggccactttcatggtcaattcactatatatgatgaagacaacattagctctatttgaattcactgacagacgtctggaaatgctacagtttcaggtaaatttttctataaaatgactattgactatgattgaatctttttctctatgtgatagctttaagttattggcttaactagttttaatgacctaattcctatagatcccttgatatcatctgatgaaaggacacacatgcatatacacaacacacgcacatacacaacacacacacacacacacacacacacacacacaaattcagtatttcagttttcagctttagaggaaccagaatgtgtaatgtttaaaatacttgattcataccataatatgtgatagtagattgaagctttctgattaatttgaacagttagtctgtatgtggattttagtttctgaactgtgaataatatgctatatttttcaagctgcatagttaatgcaaaatgtgttacagaggacagatatatttttatctatgtgtaaaccagtgttaggcaaaacattacaaattgctataccaaccacttgagttcttgagtcctataaagcaaatggttatcacttaagagagtatatgatgactaaaacaaagccagttgtaaaatttagtagatagttggattccagttttaagcagtgattattggtaaatatactgttttttaaaaaaacaactctgaatgttctgtgctatcacacatatatcaacagtttgacagtgggtataggaatgagttttgatatatctaaattcatattttctaatttttaattttttcttttaaaataaatgtatcagaattttccatatttgtggtttaaagtcaaataattctacagaacttgttacgaaaagccaccagtgtaccatcctctccacccccaacatctctttctcatttctccctcaaaagcacaatttctttcagtttttatagttgcttcttttggtatttatatttgtaattctaaacacttacgtgtattgctacttatagattttttttagttttttgtctaatgtattaaattagatatattctaatacattgtgaaatgaaatgaacaatgaaaatttagttatctactgccactcccccaacccccctggataagaatatggtcatacttaagagttttcccatcctcccaatgtagctatattataaattttggttagatcaatgttttgttaaattattattactatgtaaacattattggtgactgagccatgtaatgaagaatggttaatttacctttcttggataacttcttcattttctgtggaattaataacatttttatttaagaaatgtcacttttttatgtatttgtcactaattcaagcccaaatccctgccatttatctaaatcttaagatgttaagatatgtcaggtgtttatcaatttgctttattaccaattatctatgtttcttatgtgttccatagctattttacgcatggtaaaaattcttcttggtctatgtgctaaattaagcttattagtttattcaagttatctatgtccttgcttatttttgccaccattggatgtgtcaactggacttttacatgtgttttaacattctccagaaatctcttgagccagatctttattagtcctggcagcattttcagtaattgttctgtcagcagataattcaggttcccctttctccagactccagtagcaattttcccagtgccctttcagaccccactggcagtcccttgagtgggtattccaagtggacaaatcccagtgtggaagtgcttattggcctattcttgcattatgcttgtcagagtgctgtcagccaagactggccacatagaacagcctggattcggtgtgatagaggacaatacaaaggtgtggatatgtgaaggtgtggtttatcacgtttctccaaagtaacaatttaccttgttgggtaaaggagtcttgattttaggacctttactaccaataacctattatttttttcccactcttatatagcttcttccagtgtttcaagcaagaagtccaggctagtcagattctcttgtttttagtaatctagtcccttcatctggtaacttacagggattttccattgagtttatatgttttcccaggatatttttggtatgtctctttttaaaaattatttgcatcttggactttggagaaccatttcaatgtaaagattcaaacctttcttttgcttagtaaagagttctatttctttaatcatcacttttctatgtgttactttttatattttgaagcccctgtccttggttggttttatctcacggatctgccatctaatttctttttaaatctcttcactttaatctatttctttgatatttgctctgtattactttccttccatttttctttcagaccgctgatttgatgctttgcagtaactctttttcaccttcattgagtgtttacctttgcgcactttgtttttctttggtttctagtaaatccagcaagtaagggctctaattgtacttccttgggcatttatttaaaaaaaaaaaaaatgaaagtactttatgtctttcagtagtgttgcctcaggaaagaaaccatacttgttctgattattcacaagggctttcttttagcttcctcacctcttttaaatcagttctaagttttttagggggacgagcagagctattggagttgcttggaaaatggcaatcatttagatggtaacagataccatagttgacagtgtactatgtcattagcaagcaaactggtaaaatctgggggaacattctggtgaggaatagaaggaagacctctagactcaggattgtactggcacaaaaaaaaaaaaaaaaagaacaagattttttctcaccagggaatgtttcaacccatcaaggtagttctcttctgtggtttttatctccattagcattagttggaatcccccaaaatagcacaaagctggggagcccatactactcacatctgttagctgcatcttcttaggcagttcctgaacctgaaatctttagtcaagtttctactgggccctcagctcttccctacttgtcacagacctgccttatcctcaggagaatttactacctgagctgtagtgggatttcctctaggcttctccagatggtatatttgatttgttaagtcagtctagaaagttgggagcgtgaggaggacaggaggtcaggaacatcaggcccttatctcggaattcttcctaaatattttattttatactgttgttgtttactagtgttttttgtttgtgttttgtttattagcagcttttaaaagggctgagaagcaacccaaattttgtgactggaggatagtcctagaatcctccttgtttataatttttaaagtaagactttttccccctttcatagaaagacttactgtttgggggaagaaagaggctttgttacagaggtgatccctgtgcctcatcatcagtgccaatgcaaggcactgcatctactctcatcagtgtcattcttcttttaaaatgttttctttgtgttttattttagatcgaagcacatttggacacacttataaatgagcaagcctcttatgttttaactagggtaggcttgagttacatctataacactgtacagcaacataaacctgaacaggtaagtgcatagatgttccttcctaattctaagaacatgccagtttagagtatgtcttctagagctgcactctggattcttggctctaccacatattagctgtgttctcctgggaaagtgacttatttttctgtatctgtttccttacctgtggattgggggtaataatagtatctgtgtcataggattgttcttaagacataatacatgcatagttcttagatgacttcctaaaatatggtagagtgccccacagtattaacaatcctttttattaaaaatagtttttgttaaaagtaatgaaaatatacaaaaattagtattataaaatgtctaaagaatattcatactggtaagtttttcagattcctatatcactattagttaattgaatgcatagattactgtataaatagcagtcatcttctttttaatttagcaaattgttgcccattactttgagaaggtagtcacttctggggccagcatatgatcttattaaattatagaaccctagtagaaataaaggagtggtgggaaccttagaaaaccatgtaagccatctttcttaagaaagcaaagaactcattcaaacagcattaacatgaagactgtgttatggcccagaaactcttaaatgaagctcttaaaacacaacttttcaattctttctttgctgaagtggtaagcaaatttctaccagtaggaaccaattttactgcctttctgtactttctaaaagtatcaaagtgaaactgttcaagcctccatgtgtcactggcatcttccagtgcttcattgccttcattttcttgggtatgcgtaaacttgaagtatcatgatatttctgttgttaataaacttgagcacgtcttgctctctccaacaaatcatagtccctgatcttattgaggttgaagaaattacacttgagttctttggaaataagctaaatgattttccaaatttgggcagtgcactaatgaactatattcagtaagtgaaatgaaatgtatatctccttttttacatcttggatctgcttttttttttttttttttaaatagggctctttagctaatatgcccaacctagattctgtgacactgaaggctgcaatggtaagtgtataataaaacattttaatttagatttccttatggatcgatagtcttcattttttgctgtgtgataatttcattctgggtgacactttttatctcttgacatgctgtattaacgttgggtccaataataatgactgagcctgtattactttaattgaacagttctggccaagtcttacattcatagtagtgttccactatgctctgatagtctcatcattactgtttaggattactgtttactctatttttagagttttgttcctaatttaagtgagaaacaggaatgacagatatgaagaaattaggctgtatatcattataaacttattactaccttgatccttcgtttaaagttcctgacgtgaaaatcgaaattagattccactcttaaaacagtttattactctttagtttgagactcactgaatttccactttattaccttccttcttttcaggtgaagatcttgtaccttcctttttgcatgatcactactttttgtagtgtgtttctgtgtcttaaatacatatactttcctcatatgtatagtgttcatatgcatagccattcattgtatgatatttaagtcatatagctctatccctcataggaatgatcccttttggaagttttatgatagtactactagtaatagtaataataatatggaagaacaacagccattaacattagcatagcaagtgttttccctgtattaactctttaatcctcatgacaaccccattcaatccaggaagttggcctacagagcttgtgggtttaactactgtactaaactagtgatcctaagtatttaaaatactcacgtatactcactaccacaatggcctgactttcatagatagtcctgtaggaaggtttttaaattttccaacaatttttgatgccaaggctttcctatatattatcttccagaactcagtttaactgaaaacaaaaggataggctcataagatacctaacaaatgcaaagaagaaggtggagctatctatatgattattagataaagtagaatttaaaaagactaaatgagacaaataagaaacattatgtcgtgataaaagacactatatagaagcaacagttataacttctatatatgaaacaaaaacatagtagcaaaaattagaaatgcaaagaaaattcgatattaaaaagtttaaataaaaatagatgaaaatgaattttagattcattaaaagatatgtttttagaaagttatatatacacttaccatactatccagtacaattccacttcaagatatttaccccccaaaaatgaagatctatgctcacacttagatctgtaacattagttagtaccaaatatatgttcccttcctctgtttctccttctctcttgacacatatccagtctgtaatacaactcataaaatatttgaaatgccattaaaaattcttcatgttcctggtgttaattttcagaacaattaaggtgaatatgaatatacgatgtctctggagaaacaaatcttgcttgagttttgtatttaatacgtgattatatacaaccatttgttgtctccatttaggggtttctaaggcacttcaattcagcatgtccaaaactaactctgcacattccaccctaaacctaagtcctcttccaggcattattaactcagaaaattgtaagaccttctatccatttatcatttaaatagttattaaccgagtttctgctattttctaggcatcatgctaagaattgggatgaaaacagatatgatctagtaagggatgcagctactacacaaataaatgaatgaagagtacagttatgtgttatgataatatggtgaattaattcatacatatccaaaatctgggagtccatcccttcattctatcagtaaccaagtcctgatggtcctcaaatatctttacgtctttcaccttgattgcccctatagtctaaaaatgctgcagtaggtacctaaggtacctaattggtgtctttgtatctattattgcaatcttccattctgtcttcctatggccagatttagcttcttaaaacttaaatcagatttctcccttacttaaattcaatggtttactaatgcttttgaaataattaaaatccttaaataagcatgccagtcctacatgatctctacttatatgttttccttcccacctcaagtcttcatgctgtctcctctccctgaacctccccacccatcaatccacttacttaatgtatattcatctttaagatttcacttcaaatgtcctttcctgagagatgcttttgccgaatccacagactaggtccttgatttatgctttatagtaccttgttttattccttaatagcatttaacaaaatttgtaattatatatttatttatattattatctgtttaacacctctcttgctaggccataagctctgtgaagctagggactatcctttttttgctcatttttatacttccattacttaatatagtaccttttcaatggtaggtattagttgaactaatgaatgcattaatgaacaaatgaacaaatatagtaaaatcaagaaacaggtagacctgaaacctgatgactttacttcttgttaatattattacttaaaagctttgtgaggaagactaaaatgaatggtttggattcaggattttgaaagtaagtattgctaatattgactatattacagatttgacagttttagggagttttagttagaatgtttagaaaatacacaatttgaacacaacaatctagttatttagagtatggaatttttctcaaggatttaattcttaaaagagatgtttatatttgagttgtttgttagcacatatatgtactttatattttgtatttctctgtttcatttaggttcagtttgatcgttatctgtcagccccagacaacctattgataccacagctgaactttcttctaagtgccacagtgaagtaagtatttttggtcccaagtagttggtaaagattcacatatttttaaatatcaagtacatttttttggaaaaaaatttattttcaagaataaatgatttaccattgaaaatctatagttctcaacctttcttctgccttggcatgccaaaggatgagatctgaacatgtctgtacttattccatgtctatatgtcactccaaaatctctaattagtacatgattgttaaaattactttgaatataattgaagctatatagctgtaataccaaattcccttacgttaacaaacatgtcagaataatgttgaatatgttatggaaaatcaataatatattcattatgcaatgcagatgaactgatttatagactattttgaatctaaggtagtgttctgtagatataaaattactcaatatcatttatcaggaatgtattcaggacaccaaatcatacattaaaatattagaatataacaattagaagaagcggagagattatatgatctttcttgattttaagaaaaatattggcaaaattgtctataggtaagaaattaggcaacattatctacacatttttttttctttctattcaaacagcagtgcagtaagtgttttctacataacaggcactaggagttaaggcttaaaagacatttgcactgttttcacggagcttataacctaataggtcagttaaacatgcgaacaaatatttacattgaaatgtacagtaaggaaagaactattgaacaaaacatttcagatatctaaaagaatgtaatgttatagaggtgatatacttattttctgttcttgagtatagaactacagcagaaaatagagcaaagaagcagctttttaactcaccatgcagaatttggtatcaattagaattggctggaaatctatggaccactttttttttttttctcagacacagagttaggaaagttccattttaggtgagtgactagagtaaatgaatttaatttttttttgtgacctttatattgtattattctaaaagatattatactatttacataaccagaattctaaagacttaagagattaccaaagaaactgttatgctgtgactcaggttgtttgtaggtgcttcttttttttttttgagacggcgtcttgctctttctcccaggctagagtgcagtgatcttggctcagtgcaatctctgcctcccaggttcaagcgattctcctgcctcagcctcctgagtaactgggagtacaggcgcccacctccacacctggctaatttttgtatttttagtagagatggggtgtcaccatattggccaggctgttcttgaactcctgacctcgtgatccacctgcctcggcctcccaaagtgctgggattacaggtgtgagccactgcgcccggccaatgtgcttcttaaattattaaatttttaactgaatacctgtaattctttttaacttaactgtgtctcagtacgtaatattagaatgttgttagccatgtcactacatgtgaaatatactgttattcttttcataatataatgattgaagagagattttaatgtactttaaaagatgacatgtagctcagatgctgtgaagcaggggtccccaaccccgggccagggaccctggtctgtggcctgttgggagcacaaaccctactgtgaactgcgcctggaaggatctaggttatgtgctccttatgagatggaacagtttcatcccaaaaccatcccccaacttcttgtccacggaaaaattgtcttccacaaaaccagtccctgctgccaaaaccactgggagctgctgctgtaaaggaaacagatggacagatttggctctgtaacattttaaggtttttacagaaaaagataatataaactaagttgaaatataaacaataatatggaaaaatgtttgcaaaatatgtaacagataaattattcttaatatattatccttaatatatagtaagatcctataaattcatacaaattgtagaaaaacaggcactgaatatttgaacaactcacagaagtaatggaaatggcaagtaaatatatgaggaaatagtaattatcaaaaaatgcaaactgaaacaacgagaacttctgtctatcagactgctgacaataaaacatttattacatactaatggaacaggtctgagaaagtgggcattttcacacttttttgaatgagagtataaattagtacaatcttttcaaagagcagtttggcaacattccacaaaatttcaaaattatacattcttaggctcttctaaaattttatttttctttcttagtcttggtaatagtttaaaaaaactgttgaaccagcagtgggattgagtattgtgtatggatctattcgagtcgtttgcctcagaaacttgtcagatttcctaagcttaaatcatttttgaaattaaatgtttgtcttccattattgaagacaatattttagtttctcctttacttttattgtcctgttgtctaacggtaacaatgtaaactttgttattttattatcagacaaatgaacaagttttggtacttttttttaaatgtgaatttttaatttagtttttaaaattattttatgatatgtgcctaacatcctattatgaattcttactatttataatgacatttaaaattgagatatgcatattatttatataagtattaatactacaaacaagagtttgaaatttcttagtacctatttacctctgttttcattcagaaatatttttaaatgttatatgcaaagtattggaaaattaaatgtgatctgcaacataattttcaatatttgtttagacgaacagaaattatggtataaatttagctacttattttcaaatcaggattgctttgaaaatatagggcattttacatatttaagatttaacgtcaggccgggcgtggtggttcactgaatgcctgtaatcccagcactttgggaggtcgaggcaggcagatcatgaggtcaggagttcaagaccagccttgccaatatggtgaaaccctgtctctactgaaaatacaaaaattagcttggtgtggtggtgtgtgcctgtattcccagctacttaggaggctgaggcaggagaatcgcttgaacccgggaggtggaggttgcagtgagccgcagtcgcaccactgccctccagcctgggcgacagagcaagactccatctcaaaaaaaaaaaaaaaaaaaaaaaaaagatttaacattaaaggagattttcttatttttatttttttgagacagagtctggcattgtcacccaggctggagtgcagtggcataatctcagctcactacagcctccatctcctgggttcaagtgattctcctgccttagcttcctgagtagttgggactacaggtgcatgccaccactcctggctgatttttgtatttttagtagagatgggggcctcaccatgttggccaggctggtctcgaactcctgacctcaaattatacacctgccttgacctcccaaagtgctggggtgacaggcttgatagcactcccggcctaaagcaaatttttaaattgcgctcctactatctgtttttggttttttcctgttctcttctcctgaactttatctatcttcatagttgcaatacctttgggacacctataacctgtgtctccctttttcttgtcttgtcttagtttgactgactttcaaaggagattttgatttagcacttcagccttggaataagctattgaatacatttaagtagctaggaaacaaggtggtataggaaatagggaaaagaatagagaaagaaaatggttttaaagaattcttccctttggagtgaatttgaagcttcttgttctattttcaatgcaaaatctccaatattcaccttatagcaatacaaaaatagagtttggactacagaaaccacagttgtgcatatataaaatgttctcaataaatctttgcttattgagtcacagttacttccataataacttaagaaataaagagaatgcagatgcttcctaaagtgagcatatgggaaaatgggtaagttttgataactcttttattcaaggtttttcctccattatagaaataatatgctagaaataaagcatgtacctataatggagtaatttttttgagagaaattgaacacttttttttcttttaactaccttcttttattcacttgtactatcaggaatatccatatagacaaaaataaagcaagtttggggtaaaattaaaaaaaaatactaccaggaagagaactactggacagctgtgaactgaatgctttagagacctcagaaagtccaaaccttaaaagcaggattaatctccaaaggctggagaacctggaattcttatgtcaaaggaaggaaaagaaagagtatcttagctgcaggagagaaaaagagcaatttgctgttcttctgcctttttgttccattcaggccttcagctgattggatggagcccgccccattgacggtgaatcttcttcactcagtcttccaacttacatgccaatctcctgtggaaacaccctcacagacacacccggaaattatgctttatcaactaactaggtatcccttatccagtcaagttaacccttaagattaactatcagagctaatttagattcatactaattaagcttaaaatcaagcctctaaattatcaacttgatctgtaattaaattaactgccttccggaacaaaacatacatacttaaagatgacagttacagacaatcaacagtgtaacatctataatgctaagcatgtgataaaatgctattgcagtgaggaagcaggaaaatatgagccaaacctagagaaaaaaatcagtcagtaaaaacatacttacaaatgctaaagtttacagaattaacagataaggtgttttaaaaagctgttaaaaatatgttcaagaatttaaaggaaaacatgacccttagagaataggggattttacaaaattagaattctagaattcagagatgcagtatataaaatgaaaaattcactggattgtcttataggccagttgaacactccagagggaaagatcagttaacttgaagagaggacaatagaaactgaagcacagatagaaaaaaaattaaaaggctggaaaatagatggagtcttagagaattgtgagataatactaagcagtctaacctgtataattagatatcatagtgtaattgaagcagaaaaatttgaataaaaggggaattttttctaaatgttatggcaaataggaaccctcagacccaagaaattaaataccaaagtataccataatcaaattattgaaaaccagtgataaagagaaaaatttttaaagacatttgcagggaacagtggcattactgacttcttgttagaaacagcgcagaccagaacacagtagaatatcatcacctttgaaaagctaagtataaaaacgtcaactttaaatgatcgatcaaaaaaaaaagtgtctttcaaactgaaagtgaaataaatgttttgaaataaacgaaagtagagaaggtttatccccagcataatgcactgtaagaaatgggtacaaaaagaaagaattcttttttttttttttttttggagacggagtcttgctgtgtcacccaggctggagtggagcggcgcgatcttggctcactgcaacctctgcgtcctgggtgcaagccactcttctgcctcggcctcctgagtaggtgggaatatggacacctgccaatgtgcccggctaatttttgtagttttagtagagacggggtttcaccatgttggcccggctgatctcaaactcctgaccttgtgatctgcccacctcgtcctcccaaagtgctgggattacaggtgtgagccactgtgcccggccaaaaaggaagaattctttaaaatcattttctatgcttttctctattattttgagaatttttacatcattgctcatcagggatattggcctgtatttttgttgtactgtttttttttttcttaatctgtctttggttttggtatcagggttaaatactggcctcatagaatgaacgtggaagtattcccttctcatctatttcttggaatagtttgagtagaattagcattagttcttccttaattatttggtaaaattcagaagtgaagccatcagttcctggctttttctttgctgagacactttttattatggctttgatctcattacttgttattggactcttcaggttttgaatttcttcatggttcagtcttggcagattgcatgtgtctaggaatttattcatttcttctaagcttatagttgctcatagtagcctataatgagcctttgaatttctggggtattggctgtgatgtctcctttttcatctctgattttatttatttggatcttctggttcttagtctagctaaaggtttgtcaattttgtctatcttttcaaaaaatcaccttttgtttcatcactcttttgtacttttgtttcaatttcatatatttctgctctgatctttattttcttctactaattttgggtttggtttcttcttgcttttctagttctttaaaatgtatcattaggttgtttatttgaagcttttctacttttttttgtaggcacttacagctacaaagtttccttttagtactgcttttgctgtatcccattggttttggtatgttgtttccattttcagttgtttcaataaattttttaatttccttcttaatttcttcattagcccactggttattcaggaacatattgttaaatttccatgtgtttgtatactttccaaaattattattgttattgatttttagttttattccattgtggtcagagaagatacttgatataatttcatttttaaaaaaattttatggacttttattgtgtcctaacatatggtctgtccttgagaatgatctatgtgctgcagagaaaatgtttattctgcagccattggatgaaatactctacaaatattgattaggtgcatttggtctgtagtgcagattaagtccaatatttcttttttaattttctctctgggaagtctgtccagtgctcaaagtagagggttgaagcctccagctattattgttttggagtctgtctctctcattatctctaataatgcttgctttgtatatctgggtgctccaatgttgggtgcatgtatatttacaattgttatatcctcttgctgaatttacccctttatcattatatactgaacttgtttgtctctttttatgtttgccttcaaatctattttttctgatataaataagtatagctactcctatttttttgtttgtttccactggcatggagtatctttttctatctctctttttttcagtctatgtctgcttttgtagatgaagtattttttttgtaggcaacagatttttgggtcttgtttttttaatccattcaaccactctgtgactttttgttggagaccatagtccatttacattgtgttattactgataaggacttactctgccatttaaaaacttgctttcttgttgttctgtgattttcacttccttctttccttccttcttgtctcttttttagtgaaggtgattttctctggtggtatattttaaatttctttttattttttgtatatctgttgtatgttttttgacttgaggttaccatgaagcttccaaataatatcttatactgcattattttaaactgacaacaacttaacattgattgtgtaaacaaacaagccaagagaaaactaataaaaactctttaccctttaacttcattgccctgctaatatttgttttttctacttatatcttattatactgtctgtcacttgaaatgttactgtagttatttttgctaggttcatctttttattctgtctactcaagatatgagtagtttacacaccatggttacagtttacaacattctgtgtttttctgtgtacctagtattaccagtgtgtttagttccttcagatgatttcttattgctcattaatgtccttttctttcagattgaagaactctctttagcatttcttgtaggacagatgtggtgttgatgaagtcctttttttttttttttttttggtctgggaaagcctttatttgtccttcatgtttataagatcttttcactggatatggtattctaggataaaagtttttttttccttcagcactttaaatgtgtcatgccactctctcctgtcctgtaaggtttccactgaaaagtctgctgccagaattattggagctcctttgtaggttgtttcttttctcttgctgcttttacgttctttttctttggcctttgggagtttgattattaaaggtcttgaggtagccttatttggattacatctgcttagtggtctgtaaccttcttctacttgaatattgatatctttctctaggttcggaaagttctctgttatcccgtcaaataaactttctacactaatctctctctgcctcctctttaaggccaacaactcttggatttgctccttggaggctattttctagatcttgtatgtgtgcttcatttttttttttattcctttttcttttgtctcctcttactgtgtattttcaaatatcctgtcttcaagctcagtagttctttcttctgtttgattagttctgcagctaagagactctgatgcattctttagcatgtcacttgtatttttcagcttcggactttctgcctgattctttttgactatttcaagctctttgttaaagttacctgataaggttctgaattttggccaggcgcagtgtctcacgcctgtaatcccaacactttgggaggccgagacacttggattacctgaggtcaggagttcaagaccagcctaaccaacatggagaaaccctgtctctataaaaatacaaaattagccaggcatagtggtgcatgcctgtaatcccagctactcaggagactgaggcaggagaatcgcttgaacctgggaggcggaggttacggtgagccgagatcgtgccattgcactccagcttgggcaagaagagcaaaactccatttcaaaaaaacaaaaaacaagattctgaatttcttctttgtgttatcttgaatttctttgcacttcctcggcacaactattttgatttctctgtctgaaaggtcacatatgtctgtcactctagggttggtcactggtgccttgtttaatttgtttggggaagtcatgttttcctggatggtcttgatgcttgtagatgttcatcagtgtctgggcatcgaagaggtgggtgttatagtcttcatagtctgggccttgtacctgtccttcttatgaaggctttccaagtattcaaggggacttgtgaattaagtctttggtcactgcagccatatctacattagggaacacctcaagccctgtggctcttgcagactcaatgagggtactacattggtggtgttgggtgagatccaggagaacttcctggattaccaggtgtagactcttgttctcttcccttactttcccccaggcaaatagagtctccctctctgtactgagctgcctcggagctgggggagtggtgatacatgcctcttcgtggcaccaccactggtactgcgctgggtgagatccaaagcaagcatagcattgggtcttgcccaaggcccacagggatcactgcatgactactgcctatgttccctcaaggtccaagggctctgcagtccgcaagtgatgaatcagtgaggcttgtgtccttcccttcagggcagtgagtttcccttgtctccgagtgggtccagagaagctgtctgggatgcagggcctggagtcaggaaccttaggaatctattatatgtggtgttctgttctgaggtggctgagctggcatccaagatacagaacaaagtccttcccatgcttctgtctcaagcagaaggaaggagtcttacccggagctacaagctgcatcacctggggttgcgggaggagtgatgcaagtactcccgtggctgccctagctggtgtctcactaggtcacgtgcaccccaagtccactggctctaagcccagcacagcacagaagcttgcccaggaattagagcccttatggcccaaaacttgcccttcagtttatttcagatcccagagcaccttatcccatggtggtggggcttgccagaactctggttctgaccgctgggatggaggcttcccttctgactagtgctggtctaaatgctccctctgtggatgctggctgagttctgcctggtgttgctttctgctgtgacagggcagcactaaattccagtgctacgtcccacaatcactcttttttctcccttccacaagcacataaattctctctccgcgccatgctgccagtgccagggattaggggaaggatggtgtaggcaattcaagactatctttcttatcctctttagtgcctctttccttaatatgatgttaaaaccaagtactatgattgctcacctaatttttggttcttaggaaggtgattttttgtgtggatagatttggcgttcctgcttgggggacgatctctggaggcttctatttgctcatctttctcctaattgtggaattttaaacacataaaacatacgacaacaaaagtgcaaaagatgcagtgggagggaagtggaagtttggtgttttaatattgtaaggatattaagttatccatgaaatatataatattgattggaggtagactgtaaaccttcccacaaccattgaaacaaataaagttatttagcataccaatagataagaacaaatagaatttttaaaaagtaattgtatcaaaagaaggtgaaaaaggagggtaaaagaacaaatgagacaagtatgaaacaagtagcaggaagatagacttaattgcagcctaataagtaactgtactaaatgtgaaagtactacagatttgaactaaaagacaaaattgttagactggatgaaaaagcatggtacaactatctgctatctataaaaagtccattttaaatataaaggtggagatagtttaaaaggatgacaaaagatataccatgcaagcactaatcctaaagctggagtagctatattactataagaaaaattagactacagacagataataataccagagataaaacgtgacattttataataggattaatacatgaagtaaatatagtagtatatctgtgcatttaatagcagagctgcaaataacatgaaatataagcttacaggattgatgaggagtagctgtatcaagaaatacagttagatatttctgcatagtcctctcagtaattgatacaaaaaaataggaaattaacatgatgcttcatagttgaacagtactaccaatctttacctaatagaaatatttaaaatactacacacaaactatagaaaatacacattgtttttaagtacggataaaacattcatgaaactaatgtaagaatgagcaaaaaaggaaataagaaatcctaagtagatgaacgtaagaactcaaactagatgattctagttctagaaagttcctagcaagaactagaaaagtcatagcaagtttttctttataaattccaagctaaatcagtttttacaatgaatgtggataacttaagctaccctattttaacatacaagagtgtcagtttagatttcaaaaaaaagcaaaccgcagttcacctatatgccctttacaagagaccatttacaacaaagtggcatacaaagaaagaaagagttgcaatattaacaggcaaaattgaattcagggtgtaagtcaataaaaggtcaaagggaaatgttttatattgataaaagtcatgcttaagtaggtcttaggtaaaaatcctgaaagatataaaaaatcatttaaaaaaatcaaacattccattgcatcaagagaggaaacactatagccaaagcatacaaagaaaaatcttacttgaatttactacataaaccagttagagaagagtaccatgacactatgttggaatattgaaaatctacagcaaacataatacttaatgatgaaacattagaaaccttttcattacagttcaaaacaatatatgcatagttactgtcacatctgtttaccttggagcttctagccattgtaatgaattgagtcataaatattgaaaagaattaataaaacttattaattttaaatgtctgtaccaaaaacaaaaaaggcaagcaattaacaaactaatagaactaaaatagagttgttacttggccagattcaaaattaacatactaaaattagtacctcttctgtataccagaaatatctaattataacaatgaaaagtaaaagactttattataatagtcacaggattgtttcctagaaataaatttgataatatacgtggaaaattatataatgaaacttataaaaatttattgaaaattctaaaagatctgactaaataggcatactctgttcatagactgaaaaattcactagtgtaacaggttaatctgtaaataactccaactttaatcaaaattctcatggaatcatttcattaaatatgtatctaagaagtatatgagagaggactcatacttctgaacatctccataattagcactctggcccaaggtggcatcatctgtgcctggtttatcacattaacctctgaacttttccattttcacacttgccctctccaccaccatccacccaagccctgcagcctaaactgaacactcagagtgatcctttaatagattacttagttcaattctttcgatgaatttaaaagaggatattgtttagaaagactaagtaattgaatcaaggtcaaaaaatttgtaagaagtagagccatgatttgtatccaacatttctgattctagaccctattctcttcaacactagactatactgtattttattagctctttctgtgttgagattattttattatttttaaagaatgctcgtagacgtctggcatatatgatgatagatgacacttatctgaaatatgtagcttggcctcataaaaaatatgctttaatttcatttatagacacatagctgacctaggatgaaaaattgtcttgacccattgtgacatttcttatatttatatggtaatgaagaaaaatcaaaattttaactaatctgtttttcataaggatattatcgtcttttcttcttgggcttttaggcttaacgcctttttttctcctgtggcacatttgattgcactcttaactgcggtgctaaaataaaactcaattttagtgatcacagaatctgatgttgaaatagtctatttctggaaatgctgggtttatggtaatgatgaaagttgtatcatgttgttatggcaaccaaaatcctaaagtacagattaatgacaagctcactgatttttggaagtaagcagttcatttcttatctcagttcagttttaaataattatttagaatacagtaaatttctttgaacatattttaaaatgagaataatatctccatttagttacatatctagagattctcttcttcaaaggatcacagctcctcgccagcaatggaacaaagctggatagagaatgactttgacaagctgacagaagtaggcttcagaaagtcgataataacaaacttctctgagctaaaggaggatgttcgaacccattgcaaggaagctaaaaaccttgaaaaaagattagatgaatgtctaactagaattaacagtgtagagaagaccttaaatgacctgatggagctgaaaaccatggcacgagaactatgtgacgcatgcacaagcttcaatagtcgatttgatcaagtggaagaaagggtatcagtgattgaagatcaaattaatgaaatcaagaagagaagtttagagaaaaaagagtaaaaagaaacaaacaaagcctccaagaaatatgggactatgtgaaaagaccaaatctacgtttgattggtgtacctgaaagtgacagggagagtggaaccaagttggaaaacactcttcaggatgttatccaggagaacttccccaacctagcaaggcaggccaacattcaaattcaggaaatgcaaagaacaccaccaagatactcctcgagaaaagcaaccccaagacatataattgtcagattcaccaagattgaaatgaaggaaaaaatgttaagagcagccagagagaaaggtcgggttacccacaaagggaagcccatcagactaaccgcatatctgtcagcagaaactctacaagccagaagacagtggggtcaatattcaacattcttaaataaaagaattttcaacctagaatttcatatccagacaaactaagcttcataagtgaaggagaaataaaatcctttacagacaagcaaatgctgagagattttgttactaccaggcctgccttataagagctcctgaaggaagcactaaacatggaaaggaacagccggtaccagccactgcaaaaacatgccgaactgtaaagaccattgatgctgggaagaaacagcatcaactaacgggcaaaataaccagctaacatcataatgacaggatcagattcacacataacaatattaaccttaaatgtaaatgggctaaatgccccaattaaaagacacagactggcaaattggataaagagtcaagacacatcagtgtgctgtattcaggagacccatctcacatgcagagacacacataggctcaaaataaagggatggaggaagatctaccaagcaaatggaaaacaaaaaaaggcaggggttgcaatcctagtctctgatagaacagactttaaaccaacaaagatcaaaagagacaaagaaggccattacataatggtaaagggatcaattcaacaagaagagctaactatcctaaatatatatgcacccaatacaggagcacccagattcataaagcaagtccttagagacctacaaagaggcttagactcccacacaataataatgggagattttaacaccccactgtcaacattagacagatcaacgagacagaaagttaacaaggatatccaggacttgaactcacctctacagcaagcagacctaatagacatctacagaactctccaccccaaatcaacagaatatacattcttctcagcaccacatcgcacttattccaaaattgaccacatagttcgaagtaaagcactcctcagcaaatataaaagaacagaaatcacaacaaactgtctctcagaccacagtgcaatcaaactagaactcaggattaagaaactcactcaaaactgcacaactacatggaaactgaacaacctgctcctgaatgactactgggtacataacgaaatcaaggcagaaataaagatgttctctgaaactaatgagaacaaagacacaacataccagaatctctgggacacatttaaagcagtgtgtgagggaaatttatagcactaaatgcccaaaagagaaagcaggaaagatctaaaatcgacaccctaacatcacaattaaaagaactagagaagcaagagcaaacaaattgaaaagctagcagaaggcaagaaatgactaagatcagagcagaactgaaggacatagagacacaaaaaacccttaaaaaaatcaatgaatccaggagctggttttttgaaaggatcaacaaaattgatagacggctagcaagactaataaagaagaaaagagagaagaatcaaatagatgcaataaaaaatgataaagggaatatcaccactgataccacagacatacaaactaccatcagagaatactataaacacctctatgcaaataatctagaaaacctagaagaaatggataaattccttgacacatacaccctcccaagactaaaccaagaagaagttgaatctctgaatagaccaataacaggctctgaaattgaggcaataattaatagcctaccaaccaaaaaaaagtccaggaccagatggattcacaggtgaattctaccagaggtacaaagaggagctggtaccatccattctgaaacttccaatcaatagaaaaagagggaatcctccctaactcatgttatgaggccagcatcatcctgataccaaagcctggcagagacacaacaaaaaaagagaattttagaccaatatccctgatgaacatcgatgcaaaaatcctcaataaaatactggcaaactgaatccagcagcacatcaaaaaacttacccaccaagatcaaattggcttcatccctgggatgcaaggctggtttaacctatgcaaatcaataaacataacctatcatataaacagaaccagtgacaaaaaccacatgattatctcaataaacgcagaaagggccttcgacaaaattccacagcccttcatgctaaaaactctcaataaactaggtattgatggaatgtgtcttaaaataataagagctatttatgacaaacccacagccaatatcatactgaacaggcaaaaactggaagcattccctttgaaaactggcacaagacagggatgccctctctcaccactcctattcaacatagtgttggaagttctggccagggcaatcaggcaagagagagaaataaaggatatttaattaggaaaagaggaagtcaaatcatccctgtttgcagatgacatgattgcatatttagaaaaccccattttcccagcccaaaatctccttacgctgacaagcaacttcagcaaagtctcaggatacaaaatcaatgtgcaaaaatcacaagcattcctatacaccaataacagacaaacagagagccaaatcatgagtgaactcccattcacaattgctacaaagagaataaaataacctaggaatccaacttacaagggatgtgaaggacctcttcaaggagaactacaaaccactgctcaacaaaataaaagaggacacaaacaaatggaagaacatttcatgctcatagatgggaagaatcagtattgtgaaaatggccatactacccaagataatttggagattcaatgccatccccatcaaggtaccaatgactttcgaattggaaaaaaaactactttaaagttcatatggaaccaaaaaagagcccacattgccaagacaatcctaagccaaaagaacaaagctggaggcatcacgctacctgacttcaaactatactacaaggctacagtaaccaaaacatcatggtactggtatcaaaacagagatatagaccaatggaacagaacagaggcctcagaaataacaccacacatctacaaccatctgatctttgacaaacctgacaaggggtaaggattccctatttaataaatggtactgggaaaactggctagccaaatgtagaaagctgaacctggatcccttccttacaccttatacaaaaattatttcaagatggattaaagacttaaacgttagacctaaaaccataaaaaccctagaagaaaacttagccaataccattcagggcataggcatgggcaaggacttcatgacgaaaacaccaaaagcaatggcaacaaaagccaaagtaggaaaataggatctaattaaactaaagagcttctgcacagcaaaagaaactaccatcagagtgaacaggcaacctacagaatgggaaaaaatgtttgcaatctacccatctgacaaagggctaatatccagaatctacaaagaacttaaacaaatttacaagaaaaaaaaccatcaaaaagtgggcaaaggatatgaacagatacttctcaaaagaagacatttatgcagccaacagacacatgaaaaaatgctcatcatcactcactggtcatcagagaaatgcaaatcaaaaccacaatgagataccatctcacgccagttagaatagtgatcattaaaaagtcaggaaacaacggatgctggagaggatgtggagaaataggaatgctttttcactgttggtgggagtgtaaactagttcaaccattgtggaagacagtgtggcaaatcctcaaggatctagaactagttttttgacccggtgaatccattactgggtatatacccaaaggattataaatcatgctactataaagacacatgcacacgtatgtttattgaggcactattcacaatagcaaagacttggaaccaacccaaatgtccatcaatgatagactggattaagaaaatgtggcacatatacaccatagaatactatgcagccataaaaaaggatgagttcatgtcctttgtagggacatggatactgctggaaaccatcattctaagcacactgtcccaaggacagaaaaccaaacaccacgtgttctcactcataggtgggaactgaacaatgagaacacttgaacacagggcggggaacatcacaccctggggcctgtcatggggtggggagtaggggagggatagcattaggagaaatacctaatgtaaatgatgagtaaatggggtgcagcaaaccaacatggcacgtgtatacctatgtaacgaactggcatgttgtgcacatgtaccctagaacttaaagtatcattaaaaaaaaaaaaagttacttccccctttcaactggtctttttgcatatcttttggtgttgtgaaaagcaagaggacagaaacagtcctgaaagtacttcccgtcagctatggactaggctgtgattgatcaaaatagtaagtaagtaaaatcaagtgcatgcccatgctagaaccagtgttcagcatgcactgctaacaacaacaacaaaaaaattcactgttttcactgcctgtacatagggtgtttagttgataaggacattcccaactttcagaagcatatgactgaactgagatgatttgttggtcattttggatttagtcatagaatccttgaaacttttacattttggacattgattatttgttactataatgattcattattgtttgagactgtgtatttcatatgtgatattagtaattagtgaataatttgggctaagaccaggcagacaatatagacagatagatcagttgattgatagacagatacttaatatactttttaagataaaggatgaatttacatagtaattattactgtaaataaaaatatagtaaactggcaagagaataaaatggttttaacactatagaaacattcatttatatacaaataactgatacgcttttataaatcatattttgggaaacttagttccctaaaataatgtatgtgtatgtatatgtgatgtatttattcatgtaggtagtttttttaaaacaataactcattaaaatactcttaactctcagtggaataatatagcttaaaagcttaaagtaccttataaagattaaccagttcaatatttggtttatagtggagaaagcagtcttggagaggttaaattacttgttcaaggcaacaataagtggcagagcttcaactagaatgtaagccttctaacagtaatttactcgtctataccattttatctgtactgtaccatatagaactgattagaaaatacttaataaaagtgagtgtaggaacctgttgctttggtagtgataaatgaactcatatttgttcagaaatgtggaatcacactgtcagccagagttcttggtctttataatttaagtttgactcagactcgcttcagagaatctcccttttcattttatttctatcctgttggctttagcaggcagttagcaggccaggaggagcagttccttattctttgctttttttccttcctccttcattcatgtaatacatgaagatttctttttatccagcggctttgctttcttcatcttctccaccatatgcatattctttttttaaccccttccatatctcagtggctttttaagctgaggcggagattgaagacatactataccatctaacaccaaaatttaaaatgaattttaaacactcgtttagttttaactggcttgattttatttaattatctgtgtttatgtggtactgctttattttatctattgcagacttacagtggattttcagctgtattgttagttacagacattcgtgagctaatttatatagcttagaaacaaatgtgtcaagttacaactaaatttcagtaaattttaaattttttatcactgttacttgaaaatgaaatttaaatttcactactttagaagtttcaacaatactacatttacaagttaaatactacatttacaagttactctgaacttttaaaaatcatattcaatatttataattgtacattattcttattttatactttttatgagaaggaatagccttatttttgtgtactccttatatacgatcaaatatatgctgtattgagattgagtatagacttgagtatgaggcatgagtaatgaatgctttacacacttctcagaaatctatgttattgcgcttagaaaagaactaagaacactgtttctaaaatccagtatctgacttgttgcaaaagtggatatcaaatgtatgttatatctaacaaagttttaaaatactagtttctagtagtttttaatgaaaaataatttttgcattattttgttacattcattgtcaagcaaatttaattacaggaaagaccactaatcaatagatcaaaaaatatctccaggctgggcacagtggctcatgcctgtaatcccagcactttgggaggccacagtgggcggatcacctgaggtcaggattttgagaccagccttgccaacatgatgaaaccccgtctctactaaaaatacaaaaattaggcaggcatggtggtgcatgcctgtaatcccagctactcgggaggctgaggcaggagaatcacttgaaccgggaaggcagaggttgcagtgagccaagatcatgccactgcactccagcctgggtgacaaagaagtgagactgtctcgaaaaagaaaaaaaaaaaatccccaagcctcatttagttaagcagttttctaaaccagtttctaccatcatcccttccctttcagcagaaaggtagtacaaccagtagcaccagtctactctgctcagaaaatttactcagcatgtctttcttctactcactgtcattttggaagctttagcaatttttggaaaatgtcaagttactccaactcgtcaagagtttggaccccattagaacagtgtacagatgttccaagatcttaagtggacttctttccttattccatccaactattttcttttctagaccacagatgcatatatttccacagatagtcttaaaaatgtattattctatccattattatcaaaaaagaacataattcctagaaaaacaaagaatgtgttctgttgatgatgacttcatgacattgacctgtgtgacaacttaacacaatattactattactgctataactattacgttaatctagctagtcacagtcatgtactcttgactatgtgaagaaacagttttcctgaaatagccactgattcagcatttatggaaaacagtggtggctcaagagcccagaataggactctgtaaataaggaaaaagttctttttctccatcaagcattcagtgaacatgtatttattgagcatccatcatattcaaaatatactgggttttaagggacatgtgaacataaacagtgtcaagttagttgaaattttgtaggacaggtaagacatgaacaacatgtatttctgtaattctaaacaattttttaagtacattttggaaattgggttatattgcagtcatatccatttgatgcagaactaaccccttcctaatacaaagctgttgggatctgaacatcaagaaaatgtagaagctttattgtaagttaggagtggtaaaagctatatgaaaggaacagaaaaagtgccatggacattccacaaaggaagtaattatttctagctctaaagatcagacaagacttcatggataagagagaacatttttgttgaacattaagagcatttacaagtggtgaaagaggcactctaggaaaatgaagtaggagcaaaggaactgagatcagcaaaccagagcccagagaacagtcaagggttgcactggaattagaatagtgatagggaaagtgttagataatttttgaatggtagaaggaatttgggcttctctgaaaccaaaagaggctactgaagctctttgaaagccccaggtaagagagagatgtgatagaaagtatgcctcagcaagattgatctaacaacagtgcctaggatggattgaatattgaagagactgaaagagggaagaatagataggagtttgtgtgtactccaggcaagaggtcattttagaacctgagctgaagtgatacaacattgttatgccattaacagaagtaggaaactacaagaaaaggaggtgtggaagcaaagctttaaacacacatttttattttagtttttgtaaaaatcagaaaattagtaccagtgttctcatggccagtaccatgagtaccatgagaaccatgagtaccgttagtaccatcttctcatggtgatacatgaatagtatgagtagctagggatgacaggaagttaatgtcatggaactatgcagagagttgttgcacatttaatgaaccaatactgttttttctagctggataattttgtaaacatttgcaggactcattctttatgtgcttttgtagaaatgtatatttgtgagaaagctgtgatttgctgcaggcaagtgtcacattttagcttggggtgatatagagagatgaagagaaagctaggagatgtggttgttagtgtaaaagctgtaaggtgaaagagcagtttactttaagttttcctgagagataaaagtgttgataaattgaaacaattgtaagcatctttctttaatgtgttaccacttttgcaaaatcaatacattgacattgggtcacagtttttgtttcttatttagcagtcctgtatatcaggcacaaatatatagcagtccaatatatatcaggaacaaaacacagtccatgccctctgcaacctatatagtaatggagaaagatttaataaataatgaatacaaaattatattttatcccaaaattaggattaactgtgtagccatatagtgattattaaatagtgtatgtgtgatgataatgaaaatgaaatgtgttgattgaagtgtcaagctgtcttacaattcttagtaaatatatttttttcaaatgatgtgtttacattttgtttgcttatcaatagagagcagatcgtaaaacaatctacagaattagtctgcagagcctatggtgaagtgtatgcagccgtgatgaatccaatcaatgaatacaaagatccagagaacattcttcaccgatcgccgcagcaagtgcagacgcttctttcctgattatcttatttcattgtgttagcaaaatatgacctccctaaaacactgaaggttattttttattctttgaatttttactctataatttgatagttacagttttctttgtatcataagattgtaagtcccgataatttttttttttttggtctcagtaacagggaagtaagtaacatgttgacctgagctagtattgctgtgtatctactctaaatgagatgatctatttttttgctagccatctctccagctctgcagttttcactgtattcaggaagcataaagtagtatgaaaggtttgaagaatttttttttacaagactagttctaaattaacagcttataaaaaatttgtctaaatttaataattagtataaggatatgacctaataaatgtctccttacctaaagattcatttgctttcttttaatatgagtaggcatacttagtagcttttctgaacctagcctatgtctctgtccccaaaatagctgcccttaaagagttgttagcagagagaaaaataacagtgaatgtgctcctggtgtatatggcagtgaatctcctttctgttctactttagcatactatatatatttgactgtgtacattcttatgcaattttaagtatacactcagcaataattagaaaaaaaggagagagaaaagtgatttaaacagggtggattccactctgtgggagccttcgatggaactcaaggtggagctcagcctttccaatgagctctaagcatgtagatagcctgagctgtgtctaagcctggtgtttaaagatgggtatttgtcatacaatatgggtcctaaatccaaccaactacacattttatctggtgttcaaaccaaagaaacaatgatctactcaaacattggagaaaaaaactgccagaggaggagttgccaattggcagtgtgtcttatctccatgttgtaactggactctgactttagaccattacctattaggaagattaaaaatgactgtatttttaaaggaataaatcccagtgtgcctgatttgacattcttgtcagcaaaaaaaaacttaatttctagtaaatctataaaaatgggtaagtccctaaattacaaatgagaaaattgaagcacaaggaaaaaaataactagtttgaaatattttgaaaagtaataacataaaactagtatttgtagaagattatgtgttgtatataacaaattagtatttatagaatatgacctatttatctgaagtttataattgtttatacctaatacagttctttttggagtaagaatgattatataatcgttatccatttgggtataaatctgtatttttagttttttccctttgattagtatgtgttacatataaagacagaaaataaagtataaatcaagagcttaaattgtatataatttatttctacagagaaagaagattgataccttgctatgagtgaattcctttgttttatagggaaaatttattgtgctttttacctggttttttcaaataaaatattaaaatatttctagagcagcaattattgcagctgtcctgtagatatatatcctattgatgtgtttttagaaaatgcactaatggaaaaggaaatacaacatagggcaaaactgaggtaatcagtgaaagactcacaggaaaaatgtggtatatatgatcttgagagctaaggcaaaataaaacattgtaagtaataatctattaatataacacctaaatttgctattactccatagtttgcattttgaactattttcatttggcataagtataacctggaaaaggcatgtctgcccttctttcagagaggaaaggtgtttgaatggcaaaacccttatgtggttgaacttttccatttctttctctgtgccttcatttgagcaggtggatattacctgaggaaaaagatgacacaaatggactaattggctttactcgaaattcatgattacagtgttcaaatgggcactgctgtagttggaatgtttatgtttccccaaattcatgttgaaatcctcacccctcaggggatggtattaggaggtgggtcctttgagaggtgattagattgtcaggatgaagtcctcattaatggaattagtacccttactcaagaggctcaagagatccctgtcccttctaccatgtgacgttacagtgagaagacagccatcagtgaggaagtgggccctcactagacaccaaatcttttggtgccttgattttgggcttcgagcctccagaactgggagaaataaatgtctgttgtttttataagccagctagtttatggtattttggtacagcagtctaaatgaactaagacagacattcaatattgctttgtaattctactcttaacttgccatgtttccagaggacttttacacccacattctcagttaatatccttcataattcaccaagaatagaaactattagattaatcttcctcattttcctattctcaaacatcacacccatctcctctccttccttgttttgtacttgagatgttatctctctttctatgacaggatattccctccattatgctctggctcgcatctctcatcttcttattagatccttctgtctctgggttatcccttcattttgcttcagcaacaactggcctctctgtaggattattctcaatgtcataaataatgttgtaatgttcatagtatttttaaaaactctctactcagatcctaacacttccatttctctgcttcctttcctggtttagacatgctgtcgtctacttccttatttctcattctgtctttaaagtatcccaatatagtttcagtctctcactactacaccgaaactaacctgataagcttttcatcagtgctatatgttgtcagatctagcagattcttctgtatctctatttgttgaactctcagtgtcattctacacatttctgtttgaaattctatcctttccagtcttccatggcaccactttctcctaattttcctcccatttcattaacccaacccccttttgaccttcttccctggctcttttgcctctatatgatttctaaaagttggcatactctagggcttgatcctggatacttttttgttttaatccttcctttagggatttgttacttcaaccttttctatccagaataatgttagcttaaatgtctttagatatatccatatgatggagtacagcagtgagaaaatgaatggttttcaagtacataatgttgagaaagaaatcagaataatataatactaattttatagaatgtggatacatgtaaaggtgtaaggaaaatataggaaatgattaatacaatttaagattatggagagggaaacacaggatgtgttgaagttactgataatgttttattcttatgctaggttgttagtactcttaaatattctttaaaatttttcatatatgttacataaacttctgttcatatattttacaattttaaaaaatagtttagaaatttgcttggcatagggcctgggctaaagttagaactcaatatatgagagctattttttttcattagtcttatcattaaacacatttcttaagtacctactaggtagtaggctttgtgataagcatttaaaaatataaccaaattatgtgtttcccgttgaggaattccctgtcttgcacaatgatagttacatgtattgtaaataaacatcatgaaatttggtagagtgcttgtgcatgttggcaagaagaaaaaatgaactaatatcatcctttataattcagccggatgtccttggtataagaggttgagagcacagaaaacaaagtttcaaaccacaactgtacattgttcagtctgagattatcataatgattgggttctattaactatttggttaagatgtaaaattatgtaatagtgtggtgagaggaaaaatggtggattaaggaacttaaaaattttgtcccttcataaaggtagcaataaaactggccttcaaaaaatgatcaaagtcaactttttcaggactcgagaaactaatcaaaagatcacagtaacctgagttacttaaaaaaagagaaaaaaaagccaaatgttagtaataacagcaagcattttggtgtttaacttatgccgtttccataccttgctccctagttcagcagtagtgttgaaaagaacacgccacattcatggtatgggaaagagcagaatggaccttatttgcagattatccttatttgatctgtctgatagctcccaggaaaacccatttaaaaaaccggcctttatcttgcctgttatggaactcaccctctactggggtgggggtggggaatttatttaaaacatttacctgtcattgctacatgaagcaatgggtaaaagttggagcaaacaataaactaaccagaaagctttggaagaaaggttgggaatgagatgttcataaggactttgaaaagctcttacgtatttctgggaatctagaaggctctgtgcatgtttaggactgtgtgcatgttcatgaatgaacagagagaccgtaatctctcacctctgcctgaccttgaggatctgagcaagcagggaatgaaggcagaagcaaagttagaagctgcctagctgagtgtccaagacatgtcccaacagacacacagagtccttcagcaaagactgagcaattttttggtttaggcattcaaggaactcttcatctaatcattagttgacaattaagctaatgaatcggacacataagtggttacacatgacaaagaatgtagattttacagaatgagttcatgaaagtcactaaaatataatcacagctataaaaggcagcaacaacaaacggggtggggcaagagaatctaatctgatttccaacagatagcccagatattgaacttattagacaaagattttaactattttaaatatgttcaaggatttaaggaaaccaagtctgaagaactaaagtatgagaagagtgtctcaccaaatacagaatataataaagagatacaattataaaaaggaagtttttaatacatttataattttaaaagtttaaagttacactttataaaaattatgaaaaacttatttggacatgagaattagtacacagaataaataatacactataggggataaaagcaattttgagcaggcaggagaaaaaactcagaaaacttgaaggtgggtcagttgagatgttccagtttgaggaaaaggaagaaaaaaaaatgaatgaaagaaaatagcctcagaggcctgtggagcaccgtcaacaatacacaaacaataggagtctcagagaaaaagagaaagagtctgaaagaatatttgaagaaatattgtcaggatactagaaatttggtgtaaaacattacacatccaagaagttcactgagctccaagtcggatgaactaaaaatatgtacactgggacacatcacaatcaaactgttataagccaaaggctaagagggaatcttgaaaacaccaagagagaggtaattcatcacgtacaagtgatcctccataagatgaatatcctaatttctcatcagaaactgtagaaaccaaaaggcattagctggtatattcaaagagctctgggcggggcggggggcggcagtggcgggggaacatatctgtatctggcaaaactgtgaaaacataggagaaattaagacattcccagatgaacaaaaactgagaattcattgttggccaacctgccctaagtgattgctcaacggagtacttggagctgaaatgaaaggacgctagacaaaaaaatcaccaaaagacttaaagaataacaaggaaatcgaacactcagtagctattctaaatcacctagatcccatagacatcagtggaacaatccacccaacaacaacagaatacacattcctctcaaatacacagggaacactctccaagatagaccatatgttaggccacaatacaagtctcaataaattttaaaagattgaaattatacaaagtatgttttcaaccacaatgacattgtaaattaataacaaaaggaaatttttaaaatatactaacatgtggaaattaaacaagatgctcttaacccagtggaacaaggaagaaatcacgaaggaaactagaaaatactctgagatgaaagtttgtaatgaaacaccataccaaatcttatgaaatgcagcaaaaatagttctgagagaaatttatagcctaccttaaagagaaagaaataaattaacctaatcaataaccttaagaaacataaaagaagagcaaactaaacctaatgcaagaaaaaaggaaataataaagattataacagagacaaagaaaatggagactagaaaaatgatatagaagattaataaaaccaaaagttaattctctgaaaggatagaaacattgactaatctttagctgactgaacaataaaaaaaaaaagactcaaattactaaagtatgaaacgggacattactgaacttacagaaataaggataacagaattctattaataattatatgcaaaccagtggaagtggacaaatgaaaaacacaaagtaccaaaatcaactcaagaagaaatataaaatctgaatagaactatggcaacaagatggagtcagtaatcaaaaaactcccaacaagaacaaagcccagtgaattgcttccctggtgaattcactggtggtttcacatccatgtataagtggacccacgcagttcaaacccgtattgctcaaggatcggctgtgtatccaaaataaactcttgcaattcaacaataaaaagacaaccgagggctggcacagtggctcatgcctgtaatcccagcactttgggaggccgaggcaggcagatcatgaagtcaagagatcgagaccatcctgtccaacatggtgaaaccccgtctctactaaaaatacaaaaattagctgggcgtggtggcggatgcctgtagtcccagctactcgggaggctgaggcaggagaatcacttgaacctgggaggtgaaggtttcggtgagtcgagattgtgccactgcacttcggcctggcgacagagcgagatgccttctcaaaaaaaaaaaaaaaaaaaaaaaatgacgagctggacgcggtggctcatgcctgtgatcccagcactaggtgagaagattgctggaggccaggaattcaagagcagcctgagaaacatagcaagaccccatctctgcaaaataataattttggggcatcaagttcttccttgaaaaacaaaacaaaagacaactaaattttaaagtgtgccaagtatttgaataggtaaagaagatgcacagatagctaaccctaaccctaacatgaaaaaatgatcagcatcattagtcattagggaaatgcaagtcagaatcacaatgagattctactttgcacatactaaggtggctataatgttagtaattttagaagctggtatgatgtggagaaattggaactcccatatgttgctggtggggatataaagtggtacagctgatgtggaaaacagtttaacaaacagttcctcaaaagagttatgatatgacctagcaattctatgcctaggcttttacccaagataattgaaaatttatgtctaccaagacttttacatgaatattcatggcagcacttataataactgaaaattagaaataactgaaatatccatcagctaatgaatggataaacaaaatgtggtatatccatacaatgaaatattattcatttataaaaaggaatggactactgaaacatgctacaacatggatgaatcttgaaaacattattctaattagaagccaagcacaaaaggctatatataatttgattctattttaatgaaatctccagaataggcaaatccacagagacatataagtagattagcagtttccaggggacagggagaggaactgatcgggaagagacagctaacaggtactttttggagtgatagaaatgtcctggaactacacagtgatgatgattgcacagcattgaatatactaaaagccactggattgtgctctttttaaaatggtaaattttatgttatatgaattttttcttaaagtaaattgcaaatataatggaattaaaacaggcctgttctcatgtcttaattgtgatcttttgtgtttttgtgatctgatggcctcttttgaaaaccaaaaattgaggaatattttccttgaacctggtgatagtactgatatataattgtccagtcttggaatatttaccagtttttttatacactatggactttaaaataaatatgtaagtaaaatgcagagtcatataataatattgaatacttgcaggtcagttaatctttcctaatttagttaaatatgctgtttagaataataaataggcctacatatggttactttggggctataattatattaagcacaattacctatcatcttgaatttgcatacttacttcacctctgagagaatgtgctttggaagatagataatataattatgtatttttgcaggtccaaatatgaaatttctataaactagctgagaaatgaatgtaatagtaataattagattaataacagcatattagtctatcaaatccaactacccttaatgccagtgaatgttaaaagtaaaactttcttagcactgacaatttaataagtaaaaataaatggtactaagcttacaaaaattagctgaattggggaaattgttgataaggccacaagtattaacatgttatacttgcttgctttgagggtatatagcatcttttggcaaagtgttacattattgtgaatttaacagtgaaagtttaagccagtctaggatttcaaagtttataactttactaccaggaaattaatttacttaaatatgttctttgtttccatcaatgtcaacatctgaaattccactggagaagtattagctttggcctactaaaagcaaaatgacaagaagcaagaatgcaagccagcatcaaaaattggtctcctgttttgagattgccccgagtctttctgggggtatcatttatataagtctaattttcgggattcaggcaagagctggccattgttgtgctagctgggcctccagtggaatgtaaaatgataatgaagattgaactgaggtagaaaaatgaatttaccttagaaaggacaccaaagatttgattagtattccacatagttgccatacgtatttaattgcagactaggaatttttcttgctttaaactattagattcttttacagacaaagatataagcaagccaagcattaaaaagccaaaaaggtgctgctaaaaaagaaaataaaccacaaaaacagaaagaacatctcaatgtaccctgcctttattctaaatcttacaaaaaagaaaataatttctccactgaactattaataggttaatataatgaatcatacaataacaaaccataatagaatttgcattaaccaaaaaatgtgcaaacacactactatgatttaccaaaagactctctgcaagtggtaaatcattagctctagtgttgctctttgtaacctcaggtctttggggaatggtgcagaattagtattgcttccttctttctgtgtgtgataatggtgggggaaggctagtaccatctctgtcatacatcaaattcccatatgtgaataaatttatgtatttttactgcactctttttataggtttattcattcctgcaccaacaacgaatgccattattataactttatagaaagtctcaatatatggcacagtgcttcattttctttttttcatctagagtgccttagccattcttggctttctgctgttccacaaatagcaatgtaaatttgtcagtataatagagaatccacttatatttcttcaacagctattgggaatatggttgggattacttcaactctatgtatcaatttgaggagaattgatatctttataagattaatccaaatcacagcatgtcaaaatttccttattagggtagttttaatgtccttcaaaaacactgtaattttcttcatatagatctaagaaaactttggtgtttattcctaagaaatttatagttcttgttttgtaaatgatatctattcttaagttacacttaaacttatttgttgctgtatatagaaatggaattgacttctatgtacagcagttgcaaactgatattcatatgcagaaagtgaaactagacccctaatggataaaagacttaaatgtaagacctgaaagtatgaaactactagaagaaaacatatgggaaacacttcagtaccctggcctgggtgaagattttatggagaaaacctcaaaagcataggcaacaaaagcaaaaatggacaaataggattatatcaaactaaaaagattcagcacagtaaaagaaataatcaatagagtgaagagacaaccttcagaagatatttgcaaactattcatctgacaagggattaatatttagaacatacaaggacctcaaacaactgagcaacaacaacaaaaatatccaattttaaaaatgggcgaaagagccaaataaacatctctgaaaaccagacgcaagtggccaacaggtatatgaaaaaaaaaaaaatgctgaacaccgctaatcatcagggaaatgcaaaccaataccacaatgagatattatctcattttggctattatcaaaaagagaaaaaataacaaatgttgacaagaatgcacagaaatgggaatgcatatgctgttgtaaattagtccagccactatggaaaacagtatagagattcctctaaaaactaaaaatagaactaccatatgatccagcaatctcactactgggtatatatctaaagggaattatggatatgttgaagagacattttatttttactccaatgtttattgcagcactattcacaatagccaagatatggaatcaacttgtgtcctttaacagatgagtagataaagaaaatgtggcatatatacgcagtggaatactatttagccataaaaaataacaaaattatctcatttgtgccaacatggataacttggaggacattgtatatttagtgaaataagccaggcacagaaatataaatactgcatgttctcactcaggtgaaagataaaaacattgatctcatagaagtagaaagtagaataattgatactagaggcagggacatgtaaggagatgggagtggggatagtcagaggttggttaatggatacaaaagtacagctaaatagtagaaataagttctagtgttctatagcactgtagggtgactgtaattaacaacaatctattgtatattttcaagtagctagaagattttgaatgtgtcttacagaaatgataaacatttgaggtgatggacatgctgattaccctgttagatcattacacatggatacatgtatcaaaatatcacactgtaccccataaataagtacaattaaaaaataagtggaattgattttatatgttgattataatagatcgaggcaccttcataatattattttccgtgatttttctttgagttttctctatatagatctatttgagacaaaataagagttttttttttttttttctttgaagcctatgtaccctttatttctttttcttttcttttatgctggctagaacctccagcagaatgttaactaatagcaatgataatggttacttttcttaattcagatttcagtatctcaccataaagaattatacttgctctaagttttcagcagataatctttatcagagaggaagttattttgtattctcacatgctgttattaattatgaatggacgttgaattttaagtgactttcagaatctattgagatgatcacttggcttttctcctttatttgttaatgtgatgaattatatttataattttcctggcattaaatcactcttgcattcccaaaataagcctaagttgatcatattattttccctttctgtataaatcactggatttagttttgtatgtttttgtatatttagtagcaaccttgctaaatttacttattaattgtaagcgttatttgtgtattattttgtattttctaaattggcaagcacacaatctatataattagtgacagttttctttctacctttttatcgtttcttgctatgtggcactacataatgtttaaccatttacagtgttacaaagttgaatagaaatggtaattgcggtcacccttgtctttttccaaaatgtggggaaggagaggaagctttcaattgttagataggtattttgtagataagctttatcaaattaagaaagttcctttctgttcctggtgtgtcatgattattttaaataacaaataagtattgaattttatcaattttttttctgtatctatttagagatcaatacagaaaaataatagagaatccacctatatttcttcaacaactgttgggaatgtggttgggattactttgactctaagtatcaatttggggagaattgatatctgtgcctccccccttttacttacttaatatggagaatttcaaacatcagccttgcatttctgaaataaacccagtggtcataatgtactatcctttttatatatctttttattttatatgataacacttcatttaggatttttacatctttgttcatgagaaagattgccctgtaattttcctttgtttaaaggtctttgtcaggttttgataacaggataatactggcctcataaaacaaattggtacatattctctctgttatctggaagaatgtaagattgttattacttctttcttaaatgtttagaagagtttcaagtagagccaactaaacctggagatgcctttgtgggaaggtttttaattaaaaatcccattttctaaatagacgtaaaactgtttggttgttctatttcttcttgtgtcagttttggtaaattttattttgcaaggtatatgtccatttcatctaaccgtttttgtcataatgttctatcattttagttttttaaggtctgtagacctaatattggtaatttgtgttttctttctttctttttttccttggttagtcttggaagaattatgaattttatttatcctttcaaagaacctatgttttacttggttgattttttttttattgtatatttgttttctatttcatttatttttgctctatatttttccttccttttactttcttggtattttattttctcctctttttcttttcttgaaatggaagcttatattattgattttcagacctttttctgttgtaatgtattcatttaaatatatttaatgtgttcatctgtgtttccatctaagcacaggtttagctatatccataagcttttatatgtcatattttcattaccttttacttcagaagtatttgctaatttccattgtgatttattgtttgactcatagattacttagaaatatattttcaaacatatgaatgttttctggttatttttatattactgatttcaagcttaattccgctataaccagaaaatgtattcctagtatcatccttttgatatttattcatacgtactttatggtccaacatatgatttgttttagtaaattgttctttctagatttagaaatgttttctgtagtattgggtgcagtgctctgcatatggtaaaaggataaattttgttaatcttgtttaaatcatctatagcctttctgatttttaatctgcatagtgtatcagctactgagagatacttgttaaataactatgattgtggatttttctgtatttttagttttgtcagtttttgctttatatgtttttacgctatttctagatatataaattctatctattatgatttcttctttgaactatgtgttacttagaagtatgttatttgcatttttgctattaaagtttttagcaaggaaataaggcaatcaaatttgttccttaaaaaagagtcgctaagagacttccttctgccatgccctctgatatctctctctttctgtctcctattccacagtttataaaaattaactgtagacttaccaattaagccaatcacggatatatgaattactggcagttccatttgctttgatcccatggtaaattaagcaaatcctcacagcatattgaggccctattcatattgttcacttatccttctctcccagaccctggattgggtgagtgggattctgttggttctagctgatttttgaatactagcatatgactttaatctctgaaagatctagatatctcatatactagaaataatcttatttcactcactgaaatgaccttaatcccaaaatgtgttatggtactcaatcacattaacaagtttaagcaagtatgtcagattgatttccagcttttggtgttttaagataaaatgtgaatcctttttttaactgtatgttgcaactttccttctaggtggtttcttgaacaaaataaagcagttttcttactgggtagacatcctgctttaaaaattattcataatctggagcctaaacttaatgtaaaactctgagtttggtttatatccaatagcctaaggtttcatagaattttggtggtcggcaaaggaattactggaataaaaatatcacagcttctgtgctgtgtgcagatacttactgagtgtaatgaaggaattactctctaaccgagcacatattctgagcaattaggccaagtgccaaaaccattaaggctcaaatgccaagtgcctgtagggagggttctgttacaggatttagcaacccaacccttggctcacttaccagagggtggcactccaggcttcctgataactgtgccagcctggctgagactcagcagctgccatccagccacttctggcttctggaccctctccccagtactgcctctgtctccacccttctcgcccatctgcccctccatctgcctgtcagttgagcagtggctacacagttggggacaccttacatgttgagtcatgactcccagctaacacattgcattcaccttccctgttcctccaccacctaccaatacttctcccacttggcaacttgaaaggaaagggttgccaatttctgtttcataacatttcaggggcttccattcagaggcttctggagtatcctggcactcaaggaaactgggcatggaggtggagtagggagagccactcagaggattctgggcatccagtcacccctggcccattcccaaaaaaacctgggggaacaagagtagcctttgtaactccaaatttcatcaagatgagctgaaatctggttctgtcatttccccatcctaccccatcccatactccctcctaaccccatcccatactccctcctaaccccatcccaaaaccagagcagtggaatatcttaacaatttgacttttatccagaactgaggctctttatttgttagaactaagcatttggtccaagattttctaattctttctgtgggaacttgaatcagcaccccctccccaagctcccacagaagaagcagatggggatcttggcaaggtttggaagtccaggacttggacaggttgagagttctatttgccaggctgaattgcttgtaattaaaaagcttatcctcctacttttttgcgcttctgaacttatctgaagaatcaacagagtatttaatcatgcatagaaacaaatctgtgcatataagtgaaaatctgcatttaaaggcaggtgcttaccaggagagatgagtcacgtaagctggttagggtgaagttaagctctctaatgttgacttgacatgtcttgttttaaagggtgatagggtatgatcagtgttttgtgtacaggttagggctggggtatggaactctacccccttccttctctatttgtttccttcatctccttgcctaaaaagtgcctacaataagcactctgcatattttgggtcttcttagtgacacttactgacaccagattgttaacgtttatctgctttctacaacagaaaagaaaataactcattagtcttgacattttaatgtgtgagggttttgagacaaaaaataatttggctccttccggactaagttgtgctaattgccagattgtactcatgttaggaaattgagaacaaagtgaagcatgaccacttgaggctcttgggataatgagagttttaggttattgtcagaaattacggatttttttcttgaaaatattttaaaggaggtgagtaggtgacatttttcccccttcaggagttcttactgggggcattgatgattttcggagtggaagtggaggtggcaatggcaggaaacattgtagtttatgtaccacatgttagcaaagaagggcgttctctctgtgtgtgttagtggtgggagcatttactaaatctaaccaaagcctgattgtgtacagactttcagggaaggagcagaagatgttacttttatgggctcccttacagggtgataaagacttgtgcggctgcttggaagtatttcacccctgcagtcatgttcctttcactcaggccaacagcctcaactccagctctgaatctgccacgaaggcaactagacatgaaaagtcccaattttacagcttgctctggtagccatgccaaggtgagctagagacagcaaagggatagaaaagcattgctaaactggagctttgattttaaaaatggagacctgctggcaaaagatgagacttggttacatttagtcagtcccaactctgagctgtcattgcacaagagcagccacaagccgggggtttccacatgctgtccattaggaaccagggtctcttctatctaggtggcactgccaggcactctcagatcttacctgctcacattcatttatgtaacttctctttcttgcagtttaacacacatgtctgtctatctctttcacactcacacacaatgagatttagtaacccattttaatgaggcaattatattttaactctattatgtgcaattatgcactcttttaaattgcctcagctggagtgccctggtgttggtatctcactggcacttacttgctggtccctggggaccagctgggcagctgaacccggaacactgccactcctcctggcccctactgccactccacaggtggcttagcactgccacagggcgggacaattgcaatttcctggcccacccagtggagctcttgattgctgtgtgggtggcctagatctttctcatctgctttgctgtaccagcaggattgtttatccagggctcagagccccaggtagtcctctagcttggaggggccagaaaaacaaacctggataatcatagccatgcccttaatctgatgttttttctttttagtcatctaggctctaggttcctgggggtgggagtcagaagcagagactcctaatacactcatcttcatactacctttgcagtcaaggctcagtggtaacttttcataagaaagttgtaattacgtgatatctgcttcatttaaaataatatatgatactattatatatcataatatatataatatgcaggcacctatagacttcactactcaactcaataactggaatgtttcaaatactcttgcatctgcctgtgcatatgtatcccaccccccgcctaccatcagagggaagcatttgcttgaattttgccctgacctttcacttgatttttttaaggttttatcacatatgtatgtatccctattcattattttttagttttgcatattaaggtaaaattattctgtaggtagccttctgtaatgttttttccccacttaacataatgttaagattcatctctgcacctctgtggagttgtagttcatttatcttcattgctgtataatccactgtgacaagttagtcaccctcctgtcaacagaatgtctggagcttttctaaagtcttttgtttctttagcattgtgaacaatgcttccataacactcctatgtacacatactagtgttatgcatgagaatttccctaccttggagtgaaattcctaggttacagaatatgagaatgttcaagattataagagagtgccaaattgtttttcagagtggttgaaccaacttatactttctccagccaggcagttgcaatattccagattaccatgttctgtgtcccatgtgatattaagagtacatttagaaatgaattccagctgttggccgtgggacctgggaaagattacttgctctctctaagcctgttttctcatctgcaaagtaggaattataaattgcattaaggtataggtttattgtgagaactaaaataatctgtgcaaagccaggtaatctagtacagagctagatacacaatagtgtccaacaattattagaaattattattttatgttaaaactgaagagtagagggaaatagtcgaatacagtactgctatagtctgaaagtttctgtctcccctgaaattcatatgttgaaacctaacccccaaggtaatggtattaagagagcggggccttcggttggtgattaggtcatgtggctggatccctcatgaaagggttttgtgcccttataaaataggcatgagagagcttgtttgcctcttccaccacgtggaaggtcccatctttgaagcagagaacaagccctcaccagactctgaatctgctgatgcctttgatcttggacttcccagctcctagaactgtgagcaatacatttctgtttataaattacccagtcgaaggtattttgttaagcagcccgaactaactaaaacaagtagctaacatctagcagtcatgctgttgaactctttaccttatagtaccacacacaatttaaatctgtcctgcaaagaaaattagaaatcaatatcgggaagtgaaaatattctccagttcatatcacaagtggtaggcagtttggtaatttatctaattaacacccacgactactgctattgtcttacacatattagttaggttttctttttgggctgcagtggaatgccactgacctcagcactccagaagacaacacatgccacacaaagactccctcacattgacggaggtgtccttagagacagctaacagggatgctaagagcagccaacatttccacagggctttcacaaagcgcattcatgtatggcctctcattagcctcctcactgaggtcctcaaagttacatgttatttctcattcaatttttacagataaagcagcaacagtaagagacaattaagtgatttgtcttatatgacagaagcttgactgaagcccaggtcttctgtcactggatccagtatttttttccactgcctcaccctgccccctgtattatgctccatagtacgtgtttatcgtgtttattcatttttcctttcagtgctatttaatttaatccatttgattaaaaagagaaagaaatccatttgtgtctccagaggtggctatagccattagtcagaatactgaacaaagttcactgtcaaatttgcttaaagaggaatggtgcaagaattaattgtgaaaggcttatttgaaatgaaaaaggcctaagatcacgggctttcatttctcccaatcaagttttaattactgaaaagtttagtaacagctgaagcgtgtagttaccgcactctttattgccaagaggttttttcaaaaggacttccaccgcctcattgccttctcttcttgtttctacaagacctcacttgataacattaattgtctttttagttcactttcattaaagaaaatcctacattctctggggctcaagcattagctgctcctcattagctgctcctcatgtcatgtaagtagctgcagatcaggtccatgcagacacgtgtggcactgctgagcactgccaccccctcccacatcagcaggaagaaagcctgccactgcttagggtcattccatacaaggttgatgggcagggccaccaattcccaacaacttaaggcctgtcctctgcgtatcactcagcaggtaacagatccaaccatctttctggcttgtttcccgcaggtactgaaaggcatttgctgtgtttaagtcatcctgtaagatttccaagcacttcttcgtccatcgtctccacactggacaagaatagccaggtgtgtgtcccagagacacctggagggagttatagtgaggggtaactggtggctcacccgctgcccagcgctccccagggagacccggccctgctgctcagtcctgccacttggtcttcacagtaagctttgtgactgggccctggagtcagagtcaaggaagtgcattggcacagaaggatggtcctctgcaggaggacagtcttggttccatctctcatttgggctgctgccttggcaaagtacatttaactccactggccttttcttacttgcctgaggaagataatacaaatatatagtctacccacctcaccaaattgttttgagcatccctgaaagtaatgacttgaaagcttaattgtataaagtaactgaaaagcacatatgatcttatggttattaaaaatgaccacgggcccttctcatctcatccccctgcctgattcactttttcatttatccattcaacacctttttctaatgcttgccaggttcctggcgctatacttggtgctggggggaaaagcactgaacaagatacataccttccaagggtgcaaggtaggggtgagaaggctgaagcctggcacagagtagaaataaaactaccgctgtctcattcaaaaacttcctcccaaattaagtacaaaggcctcagcctcctttccaggtcttccccagcaaggccctgtcctgctggtccagttctggtgctggtcctcacagcaagcttggtgtgattagaacccagagcatgtatcggaagatatgtgttctctgaacacatcttgtgtttcatctctgctcacattgtttcctgaaatgtcttcccttgctccagttttgcttaacctcttacagtagttgtcaaacttttcctgatttcctctcctgacccactgatgactctcctacctctgagcctccagaatatattgtacctgcttcacatcataattctttgcatattttattcaataaacatctcttgagtcctatcgtgtgtcaggcatttggctcagcactaagcattctattttaagccaaacagacatgattcctgccctcagggagcttgtagtctttatttcttcagctctccattgtttgagggttgagggctggatctttctcatctttgtgttctttataggacaccagcctctgaacatcagttgaactggtcttttaaagttagaggagctgtcaataaacacctgacataggctttcctaaagttccctggcaccatggagtcacatcacgtatcatctgtttcctggcctaggggctcttctcagactcactgtgctggcctgagaactcagttcttgacctcttaaggatggtccaggtagccaagtacttgattttccttatggtctttttaggaaacagacatccttcttccaattaccttgggctctcctgcccccattgaggaactgaaggcttttacagagcctccaaatgttccagccagaggctctagttgcaaagcagttgctagctggtgaagacctgccctcctgccactgtctctggggactatcttctttcggaacatttgccattttggatcaccaatttggggccaggagctttgtatattttatgtctcctcctaacatcaaactgacaaggtagacctgggtctctgtttattagtcgagaatcggaagggctttagagatggagggacttgccccagtggcacagcaagatcaaagccatttctatccacccccactcctcttacctctccaccttccctccatcctaatgccaggaagggaaaaatagcctgtctgtcttcaaggcagccagagggaggagatgacttccaagggtgcaggtcatttgggatatttacaaacacttatttcttaggaagaggcttaggcctaaatggaagccacaataggcactttccaaatcaacttccttggtagtgtgaggggaaagatctttacatgatcttaagcactggagattgtctatttctgagactcctgacaaagagaaagataatttatgccatttttacatttttccactaacagccaaacaggcagggacaccataattctcaattattagaagctgcgtatgttttacctctgcttcaattagaacaagaggaaaacaaaagccctgaactgaagagtgaatgattttagattggcggcacccatttaataaaagagctgggccactatcacttaggagttactctatttagagagaataatcactggaatgtagaaactctgttccagcctgactccaatcaggattcttttaaagctagtagttttgaggaaataggttaattattttttattacttaagttctatccacctcacaatcagctacttattgcttaaaagtcaatgcattccttagaataagaaatgctttggatagcacatgtaaaacctatcatggtgtactctaattggtccagatggaaatggaaattacaaacctattgacatttttgcttttttttttttttacccaatcatgtctaaatactgaccaaaataaacctagaaattaatcatacaagggaatgtgaaggttggcagacgtttggttagaaatccataggagtatgtggtgtgggctgactgtacaggcttcgaaactgccccacagtcacagatcaggatggtcaaattgcaggaaatgaccggctgactgcttccctgactatgtttaaagggcaaatgagagcatgctatttataggatgctcatcaataagctccaagttcatagctgccgaaggaaaccttagtcttgactttcaaagtcttccacattattctttcccaaaccacatatcattttaaaactttatgaaggtaatacacattttgaagtcttctttttgccagtgaaaaatcatttttcccctaaatgttaggccagttgtttctggtatttacagaagaatataagatatttattaaacattgttttaaaaaacaaatatgagaactatatttagtatttgttacaactgatgctcaaaaactctttggtggtgttggatatttaaaaatttcttttcacttctgtggacttttatgctggttcttttgtaagtctttttgtttataatttacttttatcagtggtttggagcagaattttaaatatttttacatctaggaagttcacaaagttggaaaaaaatttcttttttctttttttttttgagacagagtctcgctctgtcacgcaggctggagtgcagtggtgccatctcagctcactgcaacctccacctcccgggttcaagcgattcttctgcctcagcctcccgagtagctaggattacaggtgcatgccaccatgcccaggtaatttttgtatttttagtagagacagggtttcaccatattggccaggcaggtctcaaaatcctgacctcatgatctgcccacctcatccttccaaagtgctgggattacaggtgtgagccaccgcgcctggctggaaaaaaatttcaaagtttatattttcacaccattgcaaaatcagtgtgattgtattcagataattccgagagattgcaaatttattattaatagttacattaaaagaggctataaaaatgcaaagctacaaaaatgacaatgaaatatcaacactcaggcaggggaatgggcatttccattgctcattgctctcccagccttggaggaagttctgcttttgctgggaggccgtcaggcatcatgggtgggtgtgtctgctcgggagccaggcctggcctggaggttccatttcgtttgtcatctgttacctaaggtaagttactctgggaaagtaacataacctagtttgtctcagtttcctcattggtcagatgaggctaatgatgttgtgactcaaataagttaagacaggtaaaaagtgtagaacagtggagggcacaaaatcagcattcactggatgttagctcttcttattttcattatagttatgtttctaggattagatttgagaaaaagaaaaagtatacaacagctcagttttctccacacactctacccacttggtataatgggaaaagttctagatgaagaacgaggacatctgggatccagtcctgactttgactttcactagcctttgaccttactatacatcctgggttttggtttcctcatcactaaaactgaggggggttgtacagaaggctccctgctcccattcacccctcacatcctgtgaccttgcttgagtggctcacaaagccctaataatgtagttctttttcatgtagttttacattttaatacaataccgaaacaaattaaagcatctggaatccagctacagtaaaagctggaaatatcctaaaataatctttcagagatacatctgaaattttttttttttttttgagacggagttttgctcttgttgcctaggctggagtgcaatggtgcgatctcggctcactgcgacctctgcctcccaggttcaagtgattctcctacctcagcctcccaagtagctgggattacaggcatgtgccaccacgcctggctaatttcatatttttaatagagatggggtttctccatgttggtcagtctggtctcgaactccccacctcaggtgatccacccgccttggtctcccaaagtgctgggattacagctgtgagccactgcacccggtcgaaagttttgttttaggcaaacttctgatcagcaaaaagctggaaaaacgtaactatattttaaaagataaagaaaacaactacaaaagaatagtagtatcagcactttccttccagtgtttggctttgtttctaggaactctgaggtgaaaaaaaagaggcagaggagggaggaggagtaggcagaaggggagcaagaggatacaacttgtgtgctatgtgtggttgttattttaaggaagtttattctgaccaattttatccaaagaataaatcaacaaacacccagaagcaatctgccctaagttttttatttccaatatagacctaatcagaataatcaggttttgtcaaaaaagtttccagtaaaatagctgtctctgtcttctccattgttattgttagatattagcccttctgatcttgcacagtccccttgcctggtaacgttaactaagtaaatattaatactgtacacttttcctttggaaaatgaaggagaacaaatgggaaaagatgtaacaaatgttctgcagccctgttataaatattttatgaatgaatcagagaaattgaagatgaaaaaagcccactaattcagccagtaccctgatgtctactgctgtattctttcaagcggtttgtctggtctggtctttagtgactcaggttatagggaatttaccacttctgtcgaagctgcttttgtagtggggactatctagctgctaggaaagtttgtcaaattccccttgcttttgtttagttttctcattagtctcatttgattttgtttatttaattgcttatttttagtgtctttagattcttaattgatttctacgtgtcttttctattgctttcttttttgttcattcagcttttctctctttagttgttaccaggaagaaaccaaaacagctttttggcttgtagataggtgagaagtaacaattggttccatcaccaaattaacaacaacacttgctacatcaagtgttaggctaactactttgcatacattatctaatttattaagcaccttctttttgccagacactgagaaggcaaggttaaatatgaccctgccactgttggcagggccttataatgtagtaggggagataagcattcaaatagatagtgtcaacacagcatattcagtgtgtggggctattttcagagtcatcctggagcacagaggggggtgtccactccagcagtgaagagcaaggaacgagggcagaggtcaggtggcatgggagagagataccccaggtgagttgacccataacctgattcctgtaagaataagagttaactaggttagaagggggtgtggagctggagaggatagctacttgggaaactacataaagtttaatgttattaggttgaaaaatgtgagagttgttggaagatgaggtaggccaggagaagaaaccggccaggtttgtattacttggtggaaaacttgaactttgctttggattttaagaacagaaataaggctgccatgtgaagaacacacaggaggggcagcagagagactggcatctttcctggtgagggatcaccagtgttgcaatcgcagagtcaggttagctcttcttggttggagtatctttaaggccatctggtctgactctaaatgactaggaaattactcatcatgtgccttctaactctctgagtagttatttccatttccttgatactgaaaaaagggtagtagggaatgtatgtttgctgcggccagtggggttatgtcaaataatggttacttactgacagcagtctaacagtttctgggaagactaatgtgctcctaactgcatatgtgggagagaaacaagaactacccatttactgaatatccactctgtgcaaagcccagtgccatgggcattaacattcatggtatcagcaaggtggcagcaaagagtcaatcttctgagagttaagcagtcctaatcaacacattataggaaataactatgtgcagaagttatcctgtctaagagatgagttacttatattttcctcccagcctaaaaggaatagtttataaaaaatagttaatacttgaggttgatagatttaatacatatccaatttgggtaaagtgactatggtgtattctcaggacaggaaggaccctaaaggatgctataatctgactaattataattgtaacaggcttctctgaagtaatgtgtaatggaaaggtagtgtctgcctagagcctagaaaaggcagcatagggcaaaaggccttgaccagcattaattcataacaaccaatgaaagaagggactatgtagctcatgtgcattattgatttctaagtgtctaaaaacacatcagaatttgctgcagcttagataaaacatttactgaacatgtattgccagaatgtgagcttattgataatctccttagtatcaggagaggatatagcagtaacgtgtagattctgccttcagacccccctggattggtatcttgactttgccacttagaagctgtattagttatctgtgaaaacagaacaaattattcaaacttagttatttaaaacaatattatttcacagtttctctaagtcagagattcagaagtggcatagttgggcagttttgcctcaggggctatcatggttgttgtcatctgaaggcttgactggggcaggaggggagccactgccagggtggcttatccacatggctgacacgttggtctggttttggtcctccccttgtgggcctccacacaggctgcctgagagtcttcaccacatgatgcctggcttccttgaaagtgagaaatccatgagaatgccaggtagaaggagtagtgtcttacatcctagcctaagaagcatatgccctcacttccaccatatgctttttattagaattgagtctctaagtctggttcaaatcaagggagaaggaaaattatactccactttttgaagagaggagtgtcaaaaaatttgcatgctactgtaaactgtcacactgcgtgaccttgagcaatctatttaaaagctttatgctccaattttttcaccagtaaaatagaaatgacattagtatctgctttatagagttgtaaggataaaataaatcaatgtaaagagcttaaaacagtgcagggtgtatggtaagtgctttcagtaagattagcaatgatgctgattactaattctattctaagtctgtttgacctgtgatagagctaatccagagacaagaacaaaagatgctggcatcagtcacgtgtgtctcttaaatcgatcattcctataagcaacggtgttatctccacatcatcctattgggctttgcagaacctggatactgttttgcctaggctgcagatccaggacaggcagcatgcattcttctgtgtcacaaagccttgtttttcttttctcatcagaggaagtggtctggaaaagtgccagccaggctatgtgacttctcaggttcaacatcatggagatgagaaagaccaaatggcacccagggtcctgctgaaatcagaggcataaatctcagctgcaggcatgaggagcaattcaggaacccttgaatagatcctttcagattcttaacgtggcttcattgaacgaagacctctccagggttctgtcctaaagtcacctcagaaagctgtgtctctgacatcacaggaaggggacccagggccagaaatcacttcagcatcattcacctcaatttcacctctgagaattgaggtatcatgaacaaacgttacaagaatgctcaagaatctggctaccaaatagtccatagagatattatcctagattaaataaaattaagaaacatttattaggcacctactctaggcaagtcacagtatttcttaaattggaagaaacttgctgatggatgaagaatgaatagaattttaacccatgcaggacttaaagaaaataattgctatctgctccagtcaaagtccacagtgacattccaagaacatgtgtcaggaaattgactgagaaaagagttttgaatttttgacttacaaatgcattgagttcgaactagaaaccaaaatctacttttttgcctacttttctcaagtacagccgtcacaccaacaagcttgctttcaaaaagggaaaagaagatgtttgataggatcagaatatcccaactcctgatatctgaccaaattaaatttaaatgttcagaactttgcttttgaatatataaagcaacatgatggctggcaccaaggaaggcaagaccaccagtagtctaaatgttaccctcaggcatgcatgccctggcagctgacccttccctgaaagaaatgtcccttctattcaaagacaatgtctggggtgaagtaatttattaatttattaatacaagaagtaaaaaatactatttttggcctaatatccataataatatggaagaaatgacaaaagaaaccccatgggttctcaacgtattacactttcagccaacttaatagaagacttggctttaggataaatgcttgtatgttttataaacactcctattatttagggaggtctgagggcatctggacatagaatattattttcaagttatagcacataatttttcaggcaaaacttacccttcagaatggaatatgagccatttaatttccccttgtgtttagtcatatgaaaaaatgccacacaaggacccgggcagagaaacaaagataagagctagtcttttccttgcacaaaaatctgcacgaggaaaggcgatggctctcgttactgtgcacagatgcgtggctgtgaactgcatagctttcttttcttcttggaaaatggcctcaaattagtctaggacattggatgaactgttgctaactaagtaaaaagttcattactctctgcaactctttgcatgaatgccattgagttatatcaacggttctgaattcttttttctccaagagccccatttggcctctaaatctctttcacaactcctctccccttcttaaagatgtttcctattcactgtgagactctcatccaaggaaaataaatggaggtgaagggcctgggggtggggacaaggatgcagaggggagctgttttagagaagagaaggggaggtgagagctgctacccacataatacatgggcgcttattagagggctggaggactcttttttggcaaacatcaaattaggtccaagcattcatcccaattcactggaacatgcaaaatcagttgacaggttagagaagagaggtttttaaaagttaacatttgtttttcccctgaaaatatgaaatgactgtgggctgcagaaaaaagtaggagcaaatgcggagggttttttttttttttttagtatgagaaactaaatggctggaatggaactatttcatattttagatgcaggctgtgatcgctgaataaccttcttattttgactcacagcttgacacaatgcaggctttcattgcatgaagagccacagcaaagagttttgggccactttctctttttattcattttctaagccccatccttctcccaccccaattcccccatttcctctgtctgggtttgaatagctgaagtgtgcccacaatatgtatgcactagacacattgttacctcccttttaccaaaagcacctggcagggtcaccagtcccaagtccctccatggtgcctggcttaactctttgagtgacaaacatccaaatatatttttcaaataattttaacaaatattagaaataatctaacaaatgattttaattaatactttatgggaagaaaattaaacctgttatatttggttgttttataattttctttctaatttcctctcttctcgaacccttttcccttgggttcttaacttacaatgtgaacttgttctttcccagctgaatcagtgggagatgatagcattcattgattttaaatctaaatctgaaaatatctacagactttgtggtcacagaacaagcaaccacacatattgggtaaaggggaaaacattacccattgtgcagaaaagcctaggaatcatcagatgctttgtatttctagaaacctcgctcttttcaagaggccagagggccatcagaggataactcttcagctttctgcttccagccaatatggagtaacagggactagaggtacccttctatctgaaacaaccgaaaatctgaaaaaactatgaaataatcatttcaagacactggacaacaggtagcttaagataacctaaagcagatgcagatctattttagttagaagttgtagtttgggcaatcagcaaaagagtttaatttcttccttggtggaggtgtagaatgttggacatgctgcttgtagtaacctgtgggaggcccccctcttgtccaggtcagacaggagtcctccctaaatactgtgtgccatggatcttcaagaagtgcaccagaaatgggttttgatgagtagaaaacctcaatctctcctcattttcatccagactgaggatgaaatgaaaatgagagctacacctgtccttgaacatgagcacaagctgattgtgtttggagccacagtagaagacaggagccataggaagtcaggggctgcctccccccatcacaacaggggctagcaatggccttcttaggggcagcacctagaccacggtgctcaggggggaacagcatgtctggagtctgtggctcacgtgcccataagatgccttcttcccatgggatgtgactggtgaataggttaaaaactaggactttgaatcctgatttgaaaagtaagtgtgattcttgagggagcttctagggtgctgcgaatgtcctgttccttgatctggatgatggttagacaagtatgtttattttgtgatcattcatcaagctgtatattgatgactgtgaacttttctatacatatattatagttcagcaaaaagttaaacaggcatagtggctcacattaattatgtcttttttacaattacttcattatagaagaatgtattagtaaagctcgagtattgatttcacctcatatttttaatgatgatcctagaggtcttacatattttcaaataacaaataataattcattctctttattcctgcaggtggagacaaagctatatcattcaatcctatgccctttgttaggaaatatttactttttaaatggaaataaatattgtccttgacaagagtgtggcagccattgggcaagtaggatggtattatttagaaaatgttgatgcttaacaacacaaaagcctggattttttagttaccagatgactaatatttgtttgttcatttttgttctgttttgttttgttttgtttttttcattcctaatgtcataaacacaatgccttattttaaaattgttctctctgtttgatgttaaattcttagagtcaagcactgtatcttttttattttaaaatgatggtacagttggcagtattactaatgtgcttgtgagattgaaaaggacaatacttcccagaggcctgttagactacacaccaatccaaactaaccttaagtgaccagatattcaatattataaaatacagtcactaatttggactctgaccccaaaccaacaaatgacctagaatctgtctcagtttaatctcagcacacctgaacatcatttatctataggcagctcctcaagctaagtggccatccaaatacaactgtaacacaattttcatgtagaagtccaacttgagtttaccgagggcattttccattcctcttttgttgaaggtcttctgataaacatataacctgaaggcaagtgagatcatttttcattctagcctacaggaagtggaagctaggctggaagtggccccaaacagcatggattctggggggagaaagtgtggtaagaagggaagcaagctggttgctgcaaagtttgatgcagggccggctccatctggtcacataacacggtccactccacacagcccatttaatacattaagaagggataaggagaaggctgtgcctggaaaagctgtcatcaccttcattgatgagccaagagcttctattcatggaacacttagaatatacctatttgtcagagtacagcacacctgacatcacctgcaaagaatagctcaggtgcagaacccgtcaggagaacatcctatgagggtaatggcatggcctagaatagctgtgagcaatgagtggtggattctagattagttggtaaactccagcagagacttggaggagaccaccactacctagaagaggcaggagctctgggcttcagatccgtccaactagtatttgctgaacagtgttctgcaccaggggcagtaagcattggatatagaagtcaacaagacctgaagttcacaaggagttcatagtttagaacacagtagacagttcactgagttggaatttgttagaaactgtaaataaccagagcttttagtttactgtaaaggagtgaataattcatgtggcaattgtccagatgtctacaaggagatttccagctcctgttctcttagattcaaagttaaggaaacctgttttgatgaagataatgtccttaaccaaggcccaggaacaggggagaacagtgaagtccttcaaataaagttttcaagagaatagaaagagaggaacctctgggctcccactctgaaggctggtggttcaggagctcccagagtatgggtgctgagatgagcatgcatcctggggacagtctggtagcctgaaaaaaatgtgtctgagggctaacatgttcaactcagtgtcatttggttgtgggaactcctaaatgagcaatgtattagggaagagcaagtctaacttgatgaactgccagggactaggcaggaattggagtgaaggcccagtctcaggtccttggccttgatcatggccaaccgcaatatgcttcagccttgtggctatggcatagtcaacagagaacctttttgaatgcctggaattcagctagctctacctttggaagaaggatacttgctttgcaacagcaatgaaggtcatcaaaagaggtgcatctgagtccctgctccagaaataaaactggaaaactgagaatttgttgaaattctagtaaactccttggcattctgggctatatcagggtatatagtgaggatgtcggaaaactgaaggtagtaaggcagggattaaaggggttggatttcttgttatctggccatgtgagaaattaagtattttactttgggtcttcactggtaaatactaccttctcatatttatttagtttttctagccagtcaaatttagcagttgggggttttataccaactttggtgacactaatgttaataaattctgataacccactaccatcagaccagcccttctcagattgaaaattaacttatgtctatggtcattttctagttactattcaggagttctctcgtacacacaattcatcctttaaattgttaacagtgtctacttacactcctccatcagaaacaaaaaggatcagagaatttaccctaacaggtatttctgctaatccttttatttttgaattatttaatatttttgatagggcattcagaagagacctcagctggaagattacacctcatacaacatcttgcttttctagtttatcttgtatttaaactaaatccttcagatgagaaattgaagcagaaggaccactcccaaatcaaaacggagagagtaggggttaagagtacttggaggatggaggattttccactttgctcagctttggggagtgaaggaaatgatatatcaaagtagggacagaactcaatgccctgggatacaaatgtgatgtacagagagtaggatgatctctataaggtacagtcaggatagagcccagcagtgcctcaaccgtatacatccctggctcaggaaatcctgcactccaacagcaggaaacataggagcactctgaaatcctagggcttaaaactcctcactggtggagaagggttagcaggctagcaaaggaagctatatgaaccctagtgagaagagaggaggaaatcagtgacccaaaacaaccaggcttgggaggccaggctaaagggagaaatttccctctccaggagattacaggaagctggtccagacctctgcggcagcatgaatagccagaggaaggaatggggaggcagataaagagggcagctgaacactggctcggccccttttaatccagctgacagtgagtggaaggagaatagtggatgcccggacaagggcatgtggttctaggtgatcgtgggatcctgcagagtttgttgtcaatgggcagggagtggagaggagatgcacagttgttaggactggacagtttggaaatcacatttcaagaaaatgacaaccccagtagggtaagtgatattgaaacaaggtttgcagagagaaaatggtactcacttatatttgcacttttaagattcaactttacaaaggtggcatttcagacaaatatgaaattgataatcattttttatagggctcccaggaagagccactctgtgatgtgaattctatctagccctgctgatttgaggtctctggattccagaggggacacttggatttgacccacagcaaccctattaactcattgctgaaatgaagcaaaacttttacttgttggttgactgattgattcgtgtaagccccctcagattctagcatgcatgagaagaggaagaagcctgatcaaactgtctcccatccataatacaataactatacattattaagaaagatttgcatctgaaatgctcaagacaactgagacacttaatactattaatcacattatgagccccaagagattgcttactggaagggattttgagaaatttacagatgggaaatggaaggcaccacaagtctgctggttctctgcccattttttttctcaaaggtaggaaatgtccctcttcattgtgagattggctcatcatgctgtgaactataatgagcagactgggtcaagggtcaggggagtggagtgaaaaagagagtgtgggtggtcactgcacaaaaagccagttccaggcaagatggtcaaatttagtttcagcaaagtgttcttgcactgcctgccaagaagatggggttaattggtaggaaagtgtgggaggaaactgatgttagtggaacatttaactgcatgctttagcatttaactggattctgtatcaagtgatgtgtgtgtgcgtgtggtgtgtgtggtgtgtgtgtgtattaactcaccctacaaccctaagaaatgagaattagtttcaccattttacagatgagaaacagattaactaatcttgcctggctgcatagagttactaagaggcatagtgaggctcagaacaaataactgactgagtcctatgtgtttgctgttttaatatgattcaccttatttgttaagtgttaactatatatatatttatgcacatacacacatatacatatatacacatacaacacacacacacaatcagttctctatttgtgcaggttctgcattcacagattcaaccaacagttagttgaaaatatttgggaaaaaaacaacaatacgacattaaaacattttttaaaatacagcataacaactaagcacattgtattaggtattgtaagtaatctagagattatttaaagtattcgggaagatgtgtgtaggttatatagaaatactataccattttatatcagtgacttgggcatctgtggattttggtatctgtggggatcctggaaccaatcccccatggatagtgagggaaaactgtatatatttcattttattttcattttaaaaagttgcagttggcagacagaaggcaactatgcttccttgctatggaatttcagccacttaggatagaggtgtggagcaattacattttggcatggaattttctcgaaatgccatgcttagagcttttcctgtgtgacaactgttaccactataaaataataaacggtaagcagagtgcttaattgccctttccatcttcacacgtactccaccacatggtaatcagtatatggtcctggatgaatatttatttcagccctccctgtgaatatgcaggaatgtgaggtattcaaagcaggaaactgcaccatcagcaacattgtctttgattgttggcatttgctcacaggcgtccacccaacggcccatgatcatcttgtaaccagtgcaggaccttgtgcttctggagccattccagttgtgggaggtgatgtctcggaaaactctgccttggggactggctatagaaatgtggccagatggctttgtcatcttcccctgtctactctgtgactcttcatctggtggaaatgctgtgagggatgaaccaaatggaaactcagatttactcttcagaataatgcggatcataatacgcacacacacagcatgtagagttgctgtgtggcttaaataagtaaatgtatgcaaagcactaaaatggtgtctgtctaagtgtaaacaccaattgtgttggctattatcactattgttgttcttatctcaaatatgtgttactttctaaataactttagtgttcatagattgttaaaagacaagatgacctgaagaaaagtaagccctaaaaatccattattaacttttttctccaccactcttttcttctaaacttcactattctttgtgttttcacaaaagttgcttacttcacctggcagagatagcattacgcaggggatgattaaaatatactcacttgtacttgttggttttaaattttattatttatgaataggtaatagcatgtacactgtaaaaatctcaaaaggcaaaaaaggatatacagtaaacattaagttcctcttaccctggaccttagccatcaagttctcttccccataggcaatccctgttgcctaatttccaattcccctgcatactttaaagatcatctgtgcatctgcactcagaccactcacacgtctaaaacaaatgatagcacactacacacaaagttctgttcctttttatgctcaatgatatgttttgcatcatatttcactgccgtataaataatgctgcctcgatttttaaaataactgaacagtaatacacagtatgaatttactccaatttataatccaatccttagttaatggatattttgattttgttgttaagaatcatgcagcaatgatgtacctgttagacatgagttattaatttctcttcgaagaatcaatatgtcactacgttcaattctttgccttctacttttaaacttcacttcctcataaagcaaccttttgcgatcatctgctccaccctgactcattccaatcacctgctccaccctgactcattctgatcacctgctctgcccagactcattcccatcacctgctccaccctgacttattccaattacctgctccaccctgtctcattctccaccctgactcattccataaccatttttcccaccaaaccagtcaccccctcaccctctttaaattagctaatcggaattagtttagcttgtgtggtctaacctagccaatagatgaatgacacagcagcaggagccacgttcgtcagggataagaacaccttccccttccttgtccaggggtgtactcaccattgctccatctgtgagggcgcacccttctatagaagtaaattgccttgctgagaagaaaaaaagaaaattttatatttgagtgctatttattttgtggcaccaaaactatttataacatacctgatctttattttaaatttttgtttatttaaatattaaatatattatccacctggtattaatttgtttaaataaatgtgaggtagggttccattgctattttttaaccaggtaggttatattgactaaccttcactttgaaagtgatttgaaatacacttttcatttattaaattctcccttgtgtttaggcagtaaggcataatatttgagagtgtgggctctgcagtccagctatctgggtttgaagtttatctcctttatttgcgagtggtacaaacttgaacaaattatgtaatttgtttttctcaattccctcatgcactaagtgaggataaaaatagcaataacaccatgagattgctgataacaaaatgcaaggtaaaaattgtgtaaggcttaaaattgtgtagcctggtatacaagaggctctaaataacataagctattattgcttttctacttattattatttctggcttttgtagtctttttcccattgttgatctttctactattcacaaagcatgagtctagtatctgtagatttataaactaattaatgtaacttttcaatatgttttaatatctcatagatactgttcttcctcattacttttctattttataaatttctatttcatctgcttcataaattttgcattctcataaactaagaatcatctcctgtagttaaaaaatattgtttgtatttttgttgggagtagagtgaattaaaatatattgacttaaggagaactgacatctttataatattgaatcttcctgtttgagattggactttatgtccatattttaaagtctttgtttatgaccctaagtataattttaacgtttttatattaggcttatttctagatactttttgttaatatatcatctaactggttgttcttcatatatataatgactatgaattttttctcagtcttttttctgaattctcacatcatttgtgttatatttttaagttgattctcttgagtttttcaggtaaacaattatatcacctataaaaataatgttgccaccttaaattaagaaaatgtttttctattgtctaattgcatggactgttgcctcaggaacagtataagattgcttacaaaagccttgctttcttgttccagattttaaaaacaaggctttcaatgacaatctcgctagcaagaagctggtatacttacatacatacatacaaacagacagacacccactttctatatgtatatctagatagatttagatagacatatatgtgtgattcctgttaagatgaatctatttttggtatttaagattttaaaaatctagaatgggtattattatattgtattgaagctcttaagcatctatggaaatgaaagtatgattcttctctttcgactaattaatatgtgatccatagtattttagtaacagatttcctaatatcgaatgatctaggcattgattctagcagattatgtctatgggtattttatttaagattttgcatcagtattaataaatgaccatggtctatgggtttgcttttttgtgtgctatgtttgcagagtgtttgtagtttacaagagatttttgcaaacttctatttatgacaatatggtagattatatatctgaaaaaaaaaccttctcattacagaacatatacaaaactgctgaataaaacgaggcaaccaacattttaaatatatggttaataaggtttta

SEQ ID NO: 4 - DNA, 99960 bp, Homo sapiens
aaatgacgttgccgtttccgggtcacccaggcagcttgtggcggcgaagccatcggtgttcgctgatgtccagtctatggagtcagttggtaccggtggcggcgcggaggcagaaggcggtgtccgagtaggggcctctgccccaccaggatgttacccggcttggccgccgccgcggcccacagatgtagctggtcctccctgtgccggctccgtctgcgatgcagggcggcggcctgtaatcccagcgaccgccagggtgagtgtcccgcgctggccgctggctccgtagaagccgaactggagggccaggctgggctcggcgcctcgcctggggcaattcgcccacttgcctttcgccaacctcagaaccttcctttctggcctccgcctttccagttcagcctgcgcagcccgcgggggtcctgacaggtctctgactctgatgccttctgcagccctagcatggcccccgcgggaacttgtgggcacctcgcgggccggattgcacctctgaagcctaccgctttgtaccaaacaaaatgttacgtgcgcatcgcggtgtcccgcggttactcacctccgcggttggaaattgcggactccgcaaagttccagggtctttggagctttccagcgcaccttcatttagcacttggttgagattttcttggccttctttttcttactctcccaacttattttcttaaattttctaaaaggaaggaggggtgctactcactacggatcttttggaagaagtacgaaagtatccgacaatcattgaatgaacccagtttgggtccgaaaaacaaagaaactcttcagttcggctgagcagtctttttggtgaaaaggtggcagttgtagtggtaacccagaaaaaaaggtggttgaagagaattttcgtctctctcaacattcttttctgactcaaatttaaatggtttgagagtttccaaaataacattgaactaatcaggcttaccttcgtttttgccgtagcttgacacacattgcttgacactgagaactgataggatctctgagggagaagacagaactaagtccacccttaacctaatccctccattcttgggatgcagagagtatttaccgaaacattcatgttcgaagccaggtgtggtggtgcgctcctgtagtccagctactcgggagactgaggcaggcagatcttttgagcccaatagttctaggctagccttggcaacatagtgagctgtctgtaaaaacataggtttgaaaaaacctgtaacatgttcgtgacctcctgaaagaagtcggaagttgcagtcattcgagattttatgtaatataagctatagtaactatgctgtggatataaattagaatatattcgtatcttttatttgcaataaatgtaaagctgaatcttagaatttcaaacggataaattttaacagcactattcccagggcttttttggtagtgatagaaaagtgtaactgttgagtttttccatattggcaatatactgccaggttcccttatggacagaatgaatcatcggctgggtgcagtggctcatgctgctaatcctcaggaagattgtaaaccttaggacgctgaggtgggtggatcgcttcagcccaggagttccaagaccagcccgggcaacatggcaaaactgcctctctacaaaaaattagcctggtttggtgacgcgcgcctgtaatcctagcctgtactcaggaggctgaggtgggaggatcgcttgagcccaggaaattgaggctgcagtgagccttgagcatgccagtgcactccagcctgggtgacagagtgagacctgtctcaaaaaaaaaaaaagaaaagaaaaagaaaaatgaatcatacgtttatactgtactccagaatccccaagtaagtttctaacacaattgtttctattgaccaagcaattttggcattttacactgaaattacagtggctgttaaatttagtctaaactgccctttaagtgttggcaaaaaggagaagaaacagtgtaatttgtaatccctcttctgtgtagctgtcattatgttgaaaattatgtattctttgtctcatctgtctgtgaaacacagataattattacctaccttagtggtcaaaatgactttgcaaagttgtttggaatgtttattactacaaaaaattaaaattttttttacacttaaaaatgcttagtaggtttttaaaaataactttgtgaaaatttagtttcagtaatgaagcatttcttaaaagggcaaccattattatggcaaaatttaaaaatcatttagaaaaagagtactatttaaattggatgcatgtgagaagactatttgaagaacttttggagaaagaaaatctaaaaacagttgtttttatttgtctagaagtaaggtttagtttatgcttctaaaatgcctgtggctgggaaaagcttataaagcataaggagaggaggaaaccttgagggattgcttgaatacttaaaaatgaggaatgcctttaaaggcaaaatagaaactgtctaaaagaaatatgagagccctgtttgtaattttgagttgtctgatagccacattaaaaaaagtaaaattaaagatgaattaattttaatatatcctagaattaattttaataacgaaatttatatattttaataataaaatatataaaatttaatactattttattaagtatattcaaaatatttcaacatgtaatcaatatcaaaattattgaagtattttacatcatctttttgtactgtctttaaaacccagtgagtattttacactttcagcacatcacagttcagactaaccacgttttaagtgctcagtaaacagtgactactcaattagatagtgtagttagagttagtatctaagttataaagaatttttacaaaccagtatacattccagtaggaaaatggacaaaggaattgaatacaaagttcataaagttgttcaagtggccaataaaaatgcaaaaatgttccatactgaaaaacagagactttaaagggttttacttctcactgcctatttcattttggccgaatttttcataatgataataccccatattgagggtgtgggaaaacaggaactctcttaactactgattgaaaacataaacggtttatgccctctgacctaacagtttttactcaaaaggatttactttaaagaaataatcaaaatacatattaaaatgtttgcagaagtttattatagtaataaattggtagttcatagttatggagagtgggaaactgaaatatattatgatacctttattatgggctggtgatgtatacaaccatttttttaaaaaattataattcagggctgggtgtgttggctcatgtctgtaatcccaacactttgggaggccgaggtagggggatcacctgaggtcaggagttcgagaccagcctggccaacatggtgaaaccccatctctaccaaaaatacaaaaactagctgggcatggtggcgggcgcctgtaatcccagctacttgggagactgaggcaggagaatcacttgaacccaggaggtggaggttgcagtgagctgagattgcgccactgcactccagcctgggcgacgagcgaaactccatctcaaaagaaaaaaaaaagttataatttagaagaatagtgacatggaaaatactcttgtgttattaggtaaaaactgtagaaaaatacagtgaaaatatatactgtgatattaacagtgagtttgtctaaaaatttttttatttgtgttttacaaatgatctacagtacacatatacttctaaagaataaaaatgttacttagtttctgtagtaagtatatccttttttataaaaagttctttgggttaggatagagcacatatttctttttttcatgtatttataccttgcctcatttggcaaaaatttgagaggggaagacacttaagtatactagatgaacactgaaattaataaaagtgtaatttttaaatagaaaatagaaatcaaacatactatgttattattgtctccaatctgctagtatttattgtcataagaaaagtaggctgagaatttaacttttatccccagcagaggtccctcctcctcctcaacctctttaaataactaagagtattgacagttacaaaagaccagtctggccaacatcgtgaaacctcatctctactaaaaatacaaaaattagctaggcatggtggtgggcgcctgtaatgacagctactcaggaggctgaggcaggagaattgcttgaacccgtcagatgtggtctcaaaaaaaaaaaaaaaaaaagaccatttagactgtcaatgctcttagttgtttaaagaggttggggaggaggagggacctctgctggggataaaagttaaattcttagtctgattaagagagcattgacagttataaaagaccatttagggctgggtgtggtggctcacacctgtaatcccagcactttgggaggccaaggtgggcggatcacctgaggtcaggagttctagaccagcctggccaacatggcaaaaacctgtctctactaaaaacacaaaaaaattagctgggcatggtggcaggcgcctgtaatcccagctacttgggaggctgaggtgggagaattgcttgaacccaggaggcagaggctgcagtgagccgagatcgtgccattgcactccagcctgggcaacaagagcaaaactccgtccccccaccaaaaaaaagaccatttaggcaggcagacaggaagattctatgcagatcaagttcatgatagaatttattgtacttaagtataaaatgaagctaactgtagtatgtgcctcctagagtttttgtgaatgagaatcattcagcattggatgccaggcattatagttgctgatagtgtagtgctgaacgaggtggatggtttccacctttcttccaccagaaataaatatatttaaagtgccatagaagagataggcaggatgatgggctagaaagtagccaggatgggctatttcattcgataagatggcctaggactccagcttttctgaggtaatgactgagcctaggcatgaaagatgaaaatgagcaagccacgtgaaggtctgggagaaagagcaatttgggaagagtaaagaggaactgtaaagatcagactagtatgtatatatgtatgtatttttgagaaagggtcttgctctgtcacccaggctagagtgcactgacaggatcacagctcaccgcagccttgacttcctgggctccagtgatcctcccacttcagccttctgagtagctgggaccacaggctagcgccaccatgcccagctaatttttatatttttgttagagactgggtttcaccatgttatccaggctggtctcaaactcctgagctcaagcattccacccatctcggcctcccaaagtgctgggattttaggtgtgagccactgcgcctggcccagacaaatagttttaaggagcagaaagaaacctgttgtgtctagggtatggtggggtggtatgaaaataaatttgagtttttttattttttgtggttttttttgagatggagttttgctcttgtttcccaggctgaaatgcaatggtggatctcggcagactgcaccctccacctcctgggttcaagcaattctcctgcctcagcctcccaagtagctgggattacaggtgttagccaccacgcctggctgatttttgtgtttttagtagagatggggtttttccatgttggtcaggctggtctcaaactcctgacctcaggtgatccacctgccttggcctcccaaagtcccattacaggcgtgagccactgcacctggccgaaatttgagtattttaagccataggcttagaaaaagaggagtgttttaaaatatcactctggcccagtcgtagtggctcatgcctgtaatcccagcaaaatttgggaggccaaggtaggtagataacttgagtccaggagtttgagaccagcctgggcaacatggcaaaatcccatctctacaaaaaaaaattaaaaaatgtagccaggtagggtggcacacgcctgcggtcccagctactcaggagtctgagatgggaaaaccacctgaggctggggaggttgaggctgcagtgaaccatgattgcaccactgccccagcctgggtgacagagcaacaccctgtctcagaaaaacacaggtgggtgcggtggctcatgcctgtagtcccagcactttgggaggccaaggagggtggattacctcaggttaggagttcaagaccagtctggcccacatggtgaaaccacatctctgctaaaaatacaaaaattagtcaggcgtggtggcacatgcctgtaatcccagctacttgggaggctgaggcaggagaatcacttgaacccgggaggtagaggttgcagtgagctgagatcacgccactgcactccagcctggatgacggagtgggactccatctcaaataaataaataaataaataaataaataaaaatgaaaaagaaaaatagaattaagcaaggcagtagagaggtatgtcaagatgcagtctaggaagttgtcatcatctcctattgtttcctaactcaaaaaaaaaaaagattctctgttttttactctgctctggcgaaaagttacatcagcagtggtcttctagactgagctactccatccaggtcacacttttgcttgctacatgattaaggataaaaaggattttcctgtagttttggctagctgaaaggattaaagtaaaccagagatagtcaatctgttaatggtagactatattacaaattgtgataatgatgttaataagaccttgatgaagttccagataatttagctatggacacattcttaggttttttttttattattatgggcattttttttaatacagggaaagtataaggtataaagtaaaaactatgcataattcagatatttcaccacatttttagtagttgaaatcatactgtataagtcttccgctttttttatgcaacattataacatgagtgtttttccttgttattaaaagtttttaatgaatacataataaaagtatagttacctgccgtaatttaatcattcttctattagggaacatttgagttgtttgttttttcctgtgataaataataccatgaggaatcatctttgcattctatattatgtattttaaattcacacttaataacctctttaaaaggttatataacctcttagtaacctctttaacagttatttagctttcatatattactgccttagaaattttggaaaagaattattgaaatagtctcttaagtaaggagactgaaatctagaagacaggctgcaagcttgactctggctctgaaattagccggaaataaactcacgttgcaagaaatctttttgtttatttttagttgttgttgcggaagcaacgtatacagtagactgagttgtcagtttgtgtgagagaaaaagagtgtctttttgttgttattcgtagcctaaaaatgatggccagattttctctggaagccagagtagtggtaggtgacaaaccagattggagagagagaggacaagtagtgatcactggcagtggccattaggtcactagctacagaggccatgagagtaaaataaagacggagaagtgtggctgttctgagtagactgctgataggataccagtaactctgcagtcttgaagacacagcccttatatacacagccataaggaagttcttgtccaggccagtagaatagtaagtgccagagtaaagacttcgatatgtagcttgtttagaagtcaccttgaaaaaagaatattaatggtgggtaatatttttcactatctctttgcttactggaattaatgaattcagtaattctttttttttgtttgtttttgagatggagttttacaccgtcaccctggctggaatgcaatggcgcgatcttggttcactgcaacctccgcctcccgggttcaagcgattctcctgcctcagcctcccgcatagctaggattataggcgcccaccgccacgtctggctgatttttttgtatttttagtagagatggggtttcactatgttggccaggctgatctcgaactcctgacctcgtgacctgcccagcttggcctcctaaagtgttgggattacaggcatgagccatgcaccctgcggaattcagtaattctttaaccagtggttgtgtttctattgctatgtgttaggtattatatttgttttattgagttaaatgtgcttcagtatagtttttataatatacaatattaggtggtaaatgtatgtgccattttctgtctcgtatgaatgccaaatgtgtacttttaaagttgctgttacctgaatttctactggtgttaaaaattaaggacttttcaaaacagccagcaagaaaaagctatcaaagattatgaagatagtgtcaaaagcacttaggagtcaattttaagaggcctctactggcccaaaatagaacagtttgagcattagtcaggataatgactaaactagattgaaaaatgccaagtaatgtttaaatttatgaagttgtaatgatatacacacaaattaaaaatgtgtcactattacaggaccttgggtaattaacgtattattttgagaactggtaaataaagggaaagaagcatttagtctgactttcctatatgaactacttttctgaataaccaataaatgatggatattttctctttgtagaaatattctgagtagtaaatgaaggagtaataaaattggtatcatcactttgtaaccacctaatgaataaatgattctaagcattgaagaacagtagacactatgatcacaaataaatcaaccagttactgtgtggttcctgatgaaagaactcatcaccacttaacaaagtagtgttgacctaataaaaatagcctgaagttagataaagcctttacagccattgatttatagaacatacagaagaatgggctaaacaataccataggaattcagtcagcaaaattcagcctgggaaactaccaggacaaaaattcaggacaaacaacctggctttttcaacataaaaattgcagttaaaaaaaaaaaagacattctgtagcttaaaagagacttaaaagacatctcaattagtcccaatatgtggactttatctggatctattcacatagaaactggaaaaaaattgtaacatttgtaacaactggaaatttgaaattgagaatatttgatattaaggtttttttttaatttctggtaatggtgttatggttgtgttaaagtttttgtctcttataaatacatactgaaatatttatggatgaaattatatctgagatttgcttcaaattaatattggtgcaggtagagatgagatgaaattgtccatgagttgatcattgttgaaagtaggcaatgggtacgtggcagtttattgtgctggtttttctacctttgcatacgtttgagattttctgtagcattttaaaaacaaaagagaacactgaaaaaaatctagcatcaagtcatggaaatgggtcgtcttccaaggaaggacttttaaactgtggagtaatccctctttaaacatcttagcacaaattctatgaaaatatttcatcagtgtatgaaaaaaaagttagtggcatattgtctttgtcaggtaataattacagaagatattttgaatagggctgaacagtcagaacaccagtggccaggatgaagaagatgcttttctggagtgtgtttcctatgaaaatctgctttagcccatatttactaattatttttgctagtaggcagcatattttaatgtgtaggaatcttctgctgttatatttgctttactgaccctttaaaaaatagacacaaatgaccaaaaacattataggccttcaacagtttctcaaataagtaaaagaatcagttcacatcagaaagtttttcaagaaaataagttctaggccggaaacttgagtgaatacttatgttcccttatgtcctttgtgctcttcatattattttcaacattcataataatttatgttcctgatgaattctctgagccattaagaaatggcttttctttcagaatgcatatatctgcacacacaatccatgaattaacatttttggaagatcattattaagcacttacaaaagtttcaactcttaaatgcttaaccctccatccttggaaaaacttgactatctgtaatgatgtaatttgatttcacctaaaactttacaaaatatatgaatgatatctatatagggtttttgggttctttcaaaaagaggaattatcagtactcatggtaaaaaaagagaaggagggtcacaggaaaataggaacaaatttggttttctagtacttgggtaaattgtggaatatactttccttctgtatttgagcccttcaaagctcacagtcaacccagatgaagcagctgaagtgctttgtaattagtcttctattcttcactcaattaaaattccccatttactgaggcatctcaccaaatgttgatctaattatctgattaaaaaatcggtgacagtatgaatgaatgattaatataattcacttgattgtgaaatgaaagaggaataaatctttagctagtggaagaaggacacaggataattttgtgtaggaagtcttcctgaccttccctcccagagtcctttattctgaaaagtaattatgccaacatttttttagcttgcaaccaacatgcaaaataaagagtatctattatgtactatatacctttcaaaatagctgaatagcataaatattttatttgattttttatatttttaaaaatttccaaataagtttacaagttagagaaaattagaatgttgtcactaatttttctttacaaaatggtatttcatgtgtacctagaagcagtgaaacacctctggagagggtggcttggcaattaattatgcagctaggacttggtttgaaattaaagtatatatattttttcttttagagtggcagaatttagtgacatttggaagcttttcaaacatggttccctgtagtcatccatatattggtaccctgagtcaagtaaagttgtactccacaaatgttcagaaagaaggacagggatcacaaacactcagagtggaaaaagtaccatcatttgaaacaggtatgtgtaatttttttaatgtacttttttctgtatactggaatagtttgtgtaaaattatttgttccctggatgtttgatagaacttacttataatactgtctggactgatgttttctttgtgggaactattaaagcacttatttaatttctttattttttctatttctttttgactcagttttctacgaaaaactatctacttatctacttaaactaaaattttaatttattggtataaagtgtataataatgttccctgtttactcccaatagcatatgtagttatgtccttttttcattcctaatatttgtcttattttcttggctagtcttcccagaggtttgtgttttattatttttccaagtaatttttttttactttgaaccattatatgtttgtatcctatttcgtcaatttttactttttaattatagcctcctttctgcctttttttgggtttgttcagtcattattttttgttttgttttataacttcaacttttgtttagattcaggagggtacatgtgagggtttgttacatggtattttgtgtgatgatgaggtatgaggtacacgtgatctcatcacccagatagtcagcatagtaccaaatagtttttcaaccattgctgccctctctctctctccctcatctagtagtccccattgcctatttttgctatctttatgttcatgtgtacctagtgtttagctcctagttataagtgagaatatgtggtacttggttttttgttttctgtgttaatttgcttaggataatggcctctagctacatccatgttgttgcaaaggacataattcattcctttttgtggctgcatggtattccatggtgtatatgtaccatatttactttatccagtaccccattgatggacacctaggttgattctaagtctttgctattgtgaatagtgctgcaatgaacatatgagtgcatgtgtctttttggtagaataatttatttctttttgatatacactccctgatgggattggctggagttctttgagaaatctccaaactgctttccacagtggctgaactaacttacattcccaccagcagtgtattaagtattgacttttctctgcagtctcactagcatctcttgttttctggttctgtcattctgttattaattgtcagttagacacttagtttattaacccttccttcctttctgaagtagacatttaagccatgataacacatcccacagttttgatatataatatttttattatttgtaaatctaaatgtattcttatttctattgtgattcttctatgactttttagttgttaaagcatcattgtaaatttacagatagatggaatttttgtttatctttttgtatttaatgtatttcacaaaatgtggtctgtattgattcagtcttgaaatttgttgagtgtaacattttagtttagcaattggtcagtttttctaaatggttttcctgtgcttgaaaataatgtgtatttttaattgctggtgtggtgtttatacacatcaattcttatttttagttgttcagtacagatctttgtcctgttttaaaaattcattattaccaagggagatgttggagtatcacactctgatggtagatttgatggtctttttttatggttctgtaaatttttgctttttataatttgaggctgtcattagatacatacatatttagaattattacctaacactgatgaattattccctctatcattgtgcagctactgtttttctttagtgagctctccactacatttcttttggttactattttcccatcctttgattttaacttaattttgtcttaatatgatcatctctgtcttttaactggaagtttaggcagtgtgcatttactgtaatcactgatatagttaaacatatttctaccattttatcatgtttccttgtcctgttttcttaaattccttttttgcctttaattttttttctcattccgtcatcctttctcctctattctctttctctcatttgaaagttttagactctgtgtctgtacttcaaagcctaaagttaattgataaatttactttccttctgaaaaacacaaaagctttagagtgctttaattctgatcaccgcctccaacttatgtgctatttgttggctaatattttctgtctattctgctctttctctgctataaagtatgcattgttgcttgcttagatttattcagaatctttgttagccaccttttcttatgtctgatctttctgtctgatgtacatcctatacaagttcgtttagctgaggatcttttgtgggaaaggcacatttaagatgttactcgattgttttttggcttccactaattgttgagaagtcagatattatgcctttgtttgtatattttttctatttgacagcattttaaatttgattagctttaatttgaaagtctttttctttggtataaatggcagttttattatgaagtaactaggtatgtatttctttgtatttattctacttgagatttgttgggcttcctggatctgaggattgatatttttctacagttctggaattctacaattctcttattatcccttcatatattacatcttcccatttctgtattatctccttctggaacttcaattagaaatatgttacatcatcttatgtttttcatgtctttaaacctctctatcgtattttctatttctttacctttctggcctgcattctgtattatttcctcaggtctaccaggatcactaatttcctctttagttgcctctaatatgctggttgattatgtatgttgggtttttaacttaaatgattatattttccttttttttttctttttctttttttttttttgagaccaagtctcattctgttgcccaggctagaatgcagtggtgtgatcatggttcactgcagccttgacctccggggctcgacctaccttagccccctaagtagctgagaaaacaggtgtgtgctgccacgcccagctaatttatttttatattttgtagagacaaggtctccctgtgttgcccaggctggtcttgaactcctgggctcaagcaatcctcctgcctcagccttccaaagtgctgggattacaggggtgagccactataccggccatatttttcatttctagaaattgttttttaccttgcttggttggtctttaattccttggttgtattttcagacttaccttttattacattagatacgttaaacatagctattttatatttttaacagaaaattctgctatatgaaatctttttgtttctcactatatgagacttttcttcccttttttgctcttattcatgatgtcgtacctgtgttttataactgtgagttcttcattttccatgatgtttttgtatcttgaaagtatttgatgtttatctggactgaaaatgactttctgcctggaagggtttgtttttgcttttgtgtgctactctccagtagcattattgggaccacattaaattcagttctctgctttagatttacattgtgaattcagactgtaacttgtgttagggttcacttgtctgtaggattttcagaggagtatttttttcttccccactatttaacaccaaaatacagataggccagcttacttgctgttcccttctatgtgtattatttatttctagttcatagtgatcccatggctgtggctttttacctcagtgtcccctgttagactccttatcttggcagaacctagtcttattctctggtcttccatgcccgttgtagctctggaggtagaaataagctcaaagaatccaagcttcaatagaaatccggggaaagctggctttgatatgttcatttgttctgtagagattctgctttcacttcatttttggccttttcgtatcattttttgctagactaacaatgcatttaaaaagattttgcttggggtacaataaaaggaagcattaaaggaagtcctttattcatttattcattaatttactcaagaaatatttattgagcactttttatatggcagcaaatgagaatgactcagagttgattactaaagcagaaaattaagcaaacaaatattgtattgtaacatttagccctgtattcatgtgttcagcatctgtggattcaaccaaacaaggattaaaagatttggggggaaaatggatggctgcatctgtactgaacatatacagacatttttttcttgtcattatttcctaaacaatacagtgtaacaacggtttacttagcatttgcattgaattcggtattataagtaatctagagatgatttaaagtacatgggaggatgtgcataggttatatgcaaatactgcaccattttataagatggacttgagcatccatggattttggtatctacagggaggtcctggaaccaatccccaacaaatactgagggataaccatactgtgataggggaaattcattaatggtgctgcaggggcacataggagaggcacttaactgagtcttgagtggttaggaaagatttccataaggaaatgatacctccttggagacatgaaagaaaagtaggtattggccaggtgtggtggctcacacctgaaattctagcactttgggagaccaagtgtgtggatcacttgagcccaggagttcgagaccagcctgagcaacgtggtgaaactctgtctctacaaaagatacaaaaattagctgggcatagtggtgtgcacctatagtcccagctactcaagatgttgaggtaggagggtcaccttagcctgagaagtcaaggttgcagtgagccatgatagtgccactgcactctagcctgggcaacagagtgagaccctgtctcaaaaaaaaaaaaaaaaaagtaggtatggatgtgtggtgaatggtggaaaaaggaggtaaaattcctggaatagtgagtagaggatttggcggtggggttggtagtgttgaaagtacaagagacggtgatccagcttccatattccttttaatttttttctactgctctcttgcttgctcactatgtttcagccaaagcagtctccctttttctcagccatgttctgagaaaatggcaagagttaagcactagtcagatcggggtcttgtttgggagtttggactttgttttgtaggtagtgggaataacagagtattattaatacaagtaggggaggtacttgatcagatttaaggttttagaaagataactagttgcaaaatgtcaaacaggttgcaaaggagggagattgaaagtagtagtacaaatgaaggtctggagtagggtaataataatgcttttttttaaaggagtagatgaccttaagagatctaggagctgaataattaggacttagtaattgaatctgggggatgaagaagagggtcaagccaagggcaatgcttggttactgtttggccagctgtctagatgatttcattgatttctaaaattaggagtaccagagctggagtatattttaatgagatgatggcttggtttgcacatctgaattataggtgcctatggaaggtcttaacagatgatgcagtgaccaataggcagttggttatccagtgaatctactagtcactgcatcgtctgttaaaatgtcacacatcaggtcgggtgcagtggctcatgcctgtaatctcagcactttgggaggccgaggcaggctgatcacgaggtcatgagatcaagaccatcctggctaacccggtgaaaccccatctctactaaaaatacaaaaaattagccggagccgggcatggtggcacgcacctgtagtcccagctactcgggaggctgaggcaggagaatcgctcgaacccaggagggagaggttgcagtgagctgagatcgcgccactgcactccagcctgggcgacagagcaagactccatctcaaaaaacaaaagatgtcacacatcttaacacaactactatcctacttcaagatatcattatctcttgtctgatttactgtggtagtattctccctgggatctctgcttccattcttgtccttctgtagttcatttttcacgtaacaagtgtggtctttttaaaaacagatcatgtcacttttttaattaaaactctccattggcttctagttacccatagaacaaagccaagactgctagaataaaattaaaatttactattctgactctcaaagttctttctagctgatctggcttccgtattcctctttattttcttctgctactctcttgcttgttcattatgtttcagccaaagcactctccttttggttcggagaaaatggcaagcttgttgttatagggcctttgctctagttgcgttctctttccaaggtgcccttctccacatggctcagcctcttctggtcattcatatctcagtttaaatgtcagctctgcatagagacattttaaaatcactcaacctaaagtagccacccagtaagtctttaatactaccctaatttaatttttggcataggtagcacttactcctgattgatgttttccatattttatttcctcatcacctacatgtttgcaagctccatgacagcatgaacctcagtgtcttgctgatagtagggacataataaatatttataagtgagtgaatgcttagagttctaacctggaactaaagatttaggagtttttacctatacatagatggaactgaagccatgggtctgtttgggacagtgcagggacagtgtttagagtgaggagagatcttctagtacaaaatcccccacatgggtgagggacaggtagaagaggagcctgcaaagcagacttgagaaggagtggctggagaaaatccagactatctggtgtcaggagaagacagtgtttgaagaataataaacatttcaagaccatttttcctttagttagatgtctttcacaggggaagattttacagattccttgagaaacctgtatacatttaatggctccttgttttcattctttttcctaagcctcatcctccctttgggtttacctgtgcaatttcttctctttcttttgtggtgatggagaactgctggggtaaatattgattgagagtttgattttatgcaatgaaagaatgcagagtgtaatgagtccctaagttccagaaataagcatgtttattagaacacagttaagggaaaagaaatagtgatgaaataatataattaagggtaaaatatgttacaatgctctgcagaggtgaacacagactcaggggaaaatatttaatatggttccaccattcagaatctttcaaattgaaatccatgattaagtttcttttttctctgctgactggaataaaaatgttagtttattttcttatattagaaatacattgtttattgacagttttattttgggctcaatttttcagtacttgcttaggccacattagaccttgttagccatcagacagagtgcaagtaattgcttgattgaaagataatttgtatatttaaagatttgagattgagttttgaataattcaaatcacatgataaagtcaggaacagctcattaagaagcagagacttgctaaggaatccttaagtttttaaggagcattcagatttgttaaattttagtaaaattagttttaattttgctaatgacagcagatgtgtggcaaacagccagggtttgagcttaaaacaaatgtctagcgatattcatggatagaatgtttggttactgattgaaatcataaagattctactgcagtgatgcagtgtgagtttattaagttggtgctatgtaaaataagtattcatacatgtgtttaagccatttactagcattcttgtttgtgctgtataacactatatatttagtaacatctagacagtttgtagtgagaagaatatccagaaatatacagcttaaagcaactcattttatgtgattaagttcaataatgttgagcattgtagaaactagggttgtttctgaaacttttgacagtagatatcagttgtttggacattaggtaagttttgaaaatgtattattccacctttttcccttcactcctctctgccctgctctctgtttcccaaagctaaattgtaagaaatggatgtgtaggttctatagataaagatactttagaatttgcttgctgtgtagcgagacaaaaataaaatcataataatttaattttttaaggtcaaatgtagttactaaatagaagtgtttttaagcttatcttcaatttactagtatgacatcataacctacttaggatttggcaaacacttaaagcctttttagattttctgtacatgctttaggtatcaaaacgtactgtattttggtcaagtgaagtggctcacacctgtaatctagcactttgggaggccaaggtgaaggatcccttgaggtcaggagtttgagaccagcctgggtaacatggggagggagaccctgtctctacaaaaaataaaagaattatccaggtgtggtggcatgtgcttgtagtcccagctacttgggaggccgagacgggaggatcacttgagcccaacaggttgaggctgcagtgagccctgattgtgccactacactccagcctgggcgacacagcaagatcctgtctcaaaataaaataaaataaaataaaataaacacacacacagtatttggtcattttcctagtggttttcactgaaaaacaattgccaagaaatatactaaaaattacctgtaaaatattttgcttttatttcaaatagggctttgcttttgttagtgcttaatatattggcatttaattgcttcatataagctttgaaagaggtaactcaatggataggcagaacttctgatcacagtggtattgtgaatacatactttgaggcatgtgttctactaaccactcattggaataatagataaagtataaaaagagaaaattgaagacatagttggactaaaaaaagacatgttatatcaaagaaatggaacagaagcatctggactctgggtctgtaatctgggagtggcagctaggagtttggcttgtttggagtaatatgctacatgtgctatttgaatagcaaggtactggagtcagactcactatttgaacttatccacccacccccacagaaggagactgaaaatagctaattccagttgctacctgaggctgtgtcttacaggaagctgtaggcctagggaggcaaggagaagaccagtgtactagtccattttcatgctgctatgaggaaatacctgagcctgggtaatttatgaagaaaagaggtttaattgactcacagttccatatgactggagaggcctcatgtggcagaaggcacctcttcacagggtggcaggagagagaataagtgcaaacaggggaaatgcaagacacttataaaaccatcagatctggtgagattcactcactatcatgagaacagcatgggggaaactgctgcgtgatctgattacctcctcctggtcctgcccttgacacatggggattatggggattataattcaaggtgagatttggatggggacacagagccaaaccatatcaaccaggaactgaaacttgctgtttcctggcttagagactggattgaggggaaggaatttcaaactggcaatatgagatcaaactggcaatatgagttttgcatagaggtattagaatgaactctgagcacaagaatgtgaagaggagaatgaaaggatataccctattcagggtaagatggtgaactctaaaatttcaaaatacatgaagaatcctaatgctacgaaagccaatagaatcaataaatgtgaattaattccagttgaagctaaaataacagcttcaattgctttaaaataagtttaatgttctcaaaaggttaaatgaaggactcatattcattaaaaatgacagggaattttgaaacacaaacttgcagaaataaaaccagagcaaataattaggaaaaggagacaattagaaatcttagaaatgaaagtgtagccactaaagtaaaaatgtagtagactaaatagtcattgtcagtaggagagttagtaaattcaaattcagtctgaaggcacataggaaggcaaaaagatattccaaaaattgaaagcatttaagaacttgcagctctagcctacatttaataggtagagaaatggtgaggaatcaatatataaagagagatgagaatttttcagaatttgagaaaaacaggacttctcagatcagaaatatgttttgagtaccaagcaggataaataaaaagaaatctacccctgacactttgtagagacaccacagatttaaaaaccaaaacacgaaacaacccaacttaaaagctgacaaagagaaaaatcagaatactatcagcctaattgttgttctactgaagtagactttttacctgcaaaaatatgcagaaagcaaagatgggggagtgatttggaataatatccaggaaagagtaagaggaaaaataaatgctactctggaatttcatagtgatctaaataatcattgtagagtgaaggcaaaaataggaatgttatcatacatataaagatgaatgtcattttaaaaaaagcttattttctaaaattttgggaggtacatagtaggtgtatatatggagtacatgagatgttgtgatacgggcatgcaatgtgaaataagcgcgtgatggagaatggggtatccatcccctcaagtatttatcctttggtttataaaccaattacattctgtaagttattttaaaatatacaattaagttattactgactatagtcaccctattgtgctatcaaatagtagatctttttctatttttttaatccattaaccatcttcatctctcaaagatgagagtcattttactaaacaacccctccacattaaaaaacaaacaaacaaaaaaaactattaaagcatgtacttctgcaagatgcagaagaaacctggagttacagaagggaaaggatgaaatatccaagagacaacaaagaacaagaaatggataaaatgtcctggtaaaactattgataataaaacagtaaacttttttttaatattaaatgctaaaactataatcaaccaggctcagtggctgaggcctgatactataaccaggctcagtgactcaggcctgtactctgagcactttgagaagctgaggtgggaggatcacttgagcccaggagtttgagaccagtctgggcaacatagtgagacttcatctctacaaaaaatttaaaaattaactttgatgtgatagtgttcacctctggtcccagctactagagaagctgaggtgggatcacttgagcccaggagttggaggtggcagtgagctatgatctcaccactgcactacagcctgggtgacatagcaagatcctgactcctaaaaaaataataataatagtatgatggaagacatttagatcactatgaaattctagagtaacatttatttttcgtcttactctttctcagatactactgcaaatcaccccctacccacctttgctttctgggcaacaagaaaaaaactgtggaggaatattaccagatttcaaattatactacagggctttaataatctaaacagcataggtttaggttactaaacctaaatcctttatgctgttttactgttataaagacagacacataaaccaatggaacagaatacagagcccataagtgaatccatagatatacagtgagctcattttcaacagatgtgccaaaaacatacattggggaaaggactgtctattcagtaaatggtgctggggaaaactggatatccatatgcagaagcatgaaactagaccccttctctcgccatttacaaaaatcaaatcaaaatggagtaaagactgaaatctaagacctcaaatgatgaaactatttaaagaaaacattggggaaactctccaggatattggactgggcagatttcttgagttagatcccacaagcacaggcaaccagagcaaaaatggacaaatgggatcacattaagttaaaaggcttctgcacaacaaaggaaacagtcaacaaaatgaagagacaacccataaaatgggagaaagtatttgcaaactattgatctcaccagaatatataagaagcttaaataactctatgggggaaaaatctaataatctgattaaaatgtggacaaaatatctcaagagacgttttcaaaagaagacatgcaagtggcaaaaaaaggtgtatgaaaaagtgcttaacatcattgatcatcagagaagtgcaaatcaaaactataataagatatcatctcactccagttcaaaaggcttttatccaaaagacaggcaataacaaatgctagtgaacatgtggagaaaagggaacccttgtacattgttggtgggaatgtaaattagtgcagctactatgaagaacaatttggaggaccctcaaaaaaccaaaaatagaactaccagcaatcccactgctaggtatattcccaaaagaaaggaaaacatacaaaaaaattagctgggtgtggtggcatgtgcctgtagtcccagctactcgggaggctgaggcaggagaattgcttgaacccaggaggcggaggttgcagtgagctgagatcgtgctgctgcactccagcctggcgacagagcgagactccgtcgcaaaaaaaaaaaaaaggaaatcggtatatcagaagagctatctgcattcccatgtttattgcagcactgttcacaatagccaaggtttggaagcaagctaagtgtccatcagcaaatgaatggataaagaagatatggtctatatatacaatggagtattatttaagcataaaaaagaatgagatcctgtcatttgcagcaatacggatggaactggaggttgttacgttaagtgaaataaggcaggcacagaaagaaaaacagcacgttctcacttatttatggagctaaaattaaaacaagtaaattcatggagagagagagagtagaatgatggttactaggggctgggaagaatagtgggaggtggagagtgaggatggttaatgggtacaaaactgcagttagatagaatgaataagagctagtatttgatagcacaacagggtgactacagtcagcgataatttattgtacatttaaaaataactaaaagagtataattgggttctttgtaacacaaacgataaatatttgagatgatcgatgctccatttaccctgatatgattattacactttgtatgcctgtttcaaaatacctcatgtaccccataaatgtttaatgtgtacccataaaaaattaaaatataaaagcaaatttaaacaaaaacccaaaaaataataaaaagttttttttaaagaaaaataatgttaaacaatagaaatacagtcttataaattccaaatagcaattgggggattggatgggaggcgaatatagaaaactttttcaatctaagagatggagacggcaggaaaagcgaaataaaaataaaagcaaagaaaacaagatggtaaactgaaaacaataagatggcagaagtacaaatgtaccacagttaagtagtcagacttagtggtgttccatatcatttaaatgaactcataatctaaatatgtggaattagttaatttctgtttcattccatgttttcagagacttatattctggatcccctactaccccatctgctcaaggactttgcttttgggattatcctgttagcctactttatattttcttcgtggttattgcatcattcctatctctatgtaaaatgcagtcaacctttccttgattcattctcttcagctcctgctgaaagtccaaataccgcttccatttaatctcctattttctcctcaactattgtgtccattcccattcttgtccagaaactgctgttttcaggaggttccagtgatcttcatgttggtaatctagtatctattcttttttttaccacctagaaaaatacacaaatacctacacataaaattaaatattgttctaaacacaggcaatacaggaaggtggttaagagtgtagagtaatcaaaataactgtgcctccatgtttaaaatactagctgcgtgactttgggagaatttacaaaacctttctatgccccagtttcctcataacaaggaaaactggctctgtgactttgggggaagttataataatctctgtgcctcagttttctcataagatgaagataatagtattttcctcagagcaattttgtgacaattaaatgaaataatttgtaaagtgcataggacagtacatggcacatgttaaatgcttagtatatatagccattcttcataaactctgaaatgttattgaatgaggatataaatataatggaaaatgttttaagggtgagatttttacaatatatttgatacatacaaaaggatattataatacatatgtaagttaacaacataataaaatcaaaccttggaatttactactcaagctaagaacttcactgtcttgatcacatcctcctatctccatttgtcctatgtatccatgtgaaaaaaaagaggaaatagctttatacatttgtatatagccctgattatttacttttgcttgtttgtgaacttcgttgtgatagcttattgtatatattcttttgtgatttacttttttcattaaatttagttgctaagatttatcttattgattggtgtgtgtgtctggttcattaatgttcttggagataattatagcacatactgttcagggatgttgtatgagttaaatgagttgatacatgcttagagtagtacttagcacacagtaaaagctcaaagaaagatggccattattatgtttgttactatgcactgctgtatgaaatgttgtgtgaatataacatggtctatctatctatctatctatctatctatctatctgttctcttgctaatgggcatttgggttgttgccagtttacaacaacagaacagagtcctgctctgaacactcatgtacctctgtccttgtgccctcgtgcaagagtttcttgaagccaaatatattgacctagaagaattgctgggtcataaattatgcttgtgttcaactatagtagataatgccaacttgtttaccaaggtattgtgcccatttatatttccaccagcagtgtatgcattttcattgttccatacccttgccaacattaggtattctcatattttcctttttcttgatctgatggttataaaatagcatcttatgatttcatttggattctattaataatggggcagacattttttcaaatgtttattggttatttgtatatccttttctgtgcaagattgtccttcctattttttctaatggattgtcatttttttgatctagaggacttatttaaatattcttgattacttttgttgattctatttgttggaaatatcttctctcagtttgcggcctttcttttttctctgtttttttttttttatgggattacttgatgaacagtttttctgagttttaatttggcagaaatttatccagtttttcttgtgttgtttatatcttgtttaagaaatctttctgtaccataaaagtattctgtattatctactataaggcatgtaaataccttaacatttaaataattaattaatctacctgtaattgttttttctttatggtgggaggtagattcaaattttttaaatttaatgtgttttttggtaggtgtagggttgtacagttgtcccagtcccacttaataatcattctttattgattgaatggtatctctggtacagttttaaatagaagaactgtgcattcttttgttccttaatttaaaaatgcatttaaacattcaccattaaagacaatgtttgttgtaggtttgttttaccctttaaagaaattcctatttgtcctaattttctaaaagggtttgagatttgcatggatgttgaattgtattaaatgctttttctttagcttctgaaatgattgtatagtttctcttctttaatctgttaatgagataaatagcttttgtaatgtttaactactcttacattcttaagatgaatccaacatggtctgatacattgtcgtttttatgcattgctatattacattggctaatattaattaagtttatagatttatgaaagcagttgtttaatgtaaacttcttttaataaactttacagcagaaggtataggcacagaactcaaagctccacttaagcaagaacctctccaagtaagaggtaaatatattttatcctatttttgtattataaagatgttttgaattaaatatataacattggtttatgtagagctctttatagttatattattctaagagtatagtttattttttacttttatttaaatagattgaccataaggatttattctcttacatataaactaattttctattaaatttattttgcatttttgtcacaaattttttcaaaagcccaagaaaggaataatggcaaataagaatcatcaattgcattatcatttttagaagagtaaggcaattaaagaacaagaggcccacacttttcagctactgcttattcaaatccaggtagagtttggccgttattgtctgactttattttctaggagaaattgaaggaattcctgtttgtagctctcttctgtataacaagctgtggttcccatctccaaagcagctgtttcatggaggcagcaactctatgattaacagcactgtggctttggcatcagataaaactggattaaatttgtggctccagtgcttaccagctggctgaccttgggcaatttacttgacttctctgaggcttagttttctcccctataacgtggtgctgaaaatgagacttcttttctagggtaactttgattaacacatggtagacaattaataacaattaatgttgttatagcagccatcattatcattatcatcctcaccttcatcattaataacctgggccagggttttttagctatttggaagaaatttttttaaaaattttttaaaaatttaaaaggcggtttagagacatgaaactcacgcaaaaaaaaaatctgtatttccttatattttttttcagataaggttttgattttttaattgaactttatttttcaaatattcttattacataatatttgtgcatttaatgtaagtatgtattattttaggaatctttttacccactgtagtgataggtaatcttaggctgaatttgctctttcaacttggaagtagaacagaaaattgtgaaataataaatatgagaatagaacatgaagtgaatagatgacaattcgaaatagaacacataagtttgttattttgctcttgcacttcaggtatttgcttatttatctctatcatatgaccaaaagtctcaccttataatgatttattaacatagaccaatgttctgtaatttttaactcacagactataattgatgccaaattggtattggtattggtgtcgctggcctttttatgagcagtttgatacttgacaatagaaaaacaatttattagaaggcaatatttaacctataatctataataattttttttgtaatttttaactgatgaaattattctgtacttttcttcagttttattacattatgtgaaatggtctagtggctttaaacttttttgactgtaacccacataagaaatactaattagcaactagtatacacatagattagtatatgtaaatgaaacaaaggttttcacaaaaaaataattatatgtagtagtctttgattactttatatttctactttgtatgaaatgctgatttcacctcacagtttgaaaagcactcaactactctgttattttatttatttatttatttattattttttttggacagagtctgactttgtagcccaggctggagtgcagtggcatgatctggctcactgcaacctctgcctcccaagttcaagtggttctcatgcctcagcctcctgagaagctgggattacaggcacccaccaccacacctggccaattttttgtattttttttttagtagagacagggtttcaccatgttggccaggctggtctcaaactcttgacctcaagtgatccacctgccttggcctcccaatactctgtaattttttatcaaaacttcagttcattttcatttagaccctaagcaatttaaattataccaatatgatttagacagaccagtaatacctgttcaaggtgttcattagacaaaggttgacattttgggatcagttatagatgacatatagagacaaaagctagatggctacaaatgcaatttcatcctattctgcacttggataattttttctctgatgtcattcagtgaaaaagatcagttttctgtgaaattcattagtgaagcctcttaagtatcagcctatattcatcttcacatgtgactttcaatgtgcatatttattatgttttcctgttttttgtttagttaaagcagtccttaagaaaagggagtatggctcaaagtacactcagaataatttcatcactggagtcagagcgataaatgagttctgcctcaaatccaggtaatttttttaaaaaatgtagccgtgtgtcatatctaaataatctaaataactattcctttcttagagtgtgttacctgctaccatccatatatggaaaatttgctactggctccttaaaatgaagagatatttttattcagtcaaaaatgttaaaaattgttagcaaactaaactgaatcctgccccagcattagcaattctagtctttcttagtttcttaaacccacaatggtaaattcttcaaaagctttccatcacacaagaatcttaggagttaaattgttaagtcattggtatgtgacagaattctcaataagattatttgcgtatttgtatgtttgactgttttggttttttggccagcagagttgagtacttaatttagtgagttaaatttatgttcatgctcccaactgtgatttctgttgagtataaattatttttactactttccaatatctgttattattaattttctcatatttatatttattgaaattatgttagtcacagatttaaacttttctccctcctttgtgcacgaattagagaaatcagatgatctatctttttttcagtcttcctcattgtcacagccactttggtatatatcaagaaataggtattcctataatttttaacttttataactattacatcaacaaccaattataatattgatttagttctgacacaaattttgtgaattaagtggattaggcattgctgtctccactttaatagaccaggatgagcataatacaagatgttagtgattgacccagctcatttaagtgagtcagtgacagggagaactagaatatatatcttttgaaagctgatccatacatttttactaacatgtgatggttattgatgttttttaaatctaggtttaatttctagaacttgataacattacatagtcacagactttttatttatagattgtttcattgctttaacaaaatttccataggaagatccatgattaaatatagaatgactatttagcagtgacttgatgaatatataagcctttcagaatttaagagaaaggaaaataaataacatgtaattgacacaaactctttatgacatcattcctttgaatggatattaccacttagtattaatctacatataaacaaataatgactgtaaatttttaacttaaattcttaagtagagggatgatattctaatccatgttctttcttcttttcgttttttttgtttgtttttttttgagacagggtctcactctgctgcccaggctggagtgcagtggcacaatcatggcttactgcagcctctacctccctaggctccagtgattcttccacctcagcctcctgagtaactgggactatggctgtgcgccaccacgcctggctaatttttttttttttttttttttttttttttgagacggagtctcgctctgttgcccaggccggactgcggactgcagtggcacaatctcggctcactgcaagctccgcttcccgggttcacgccattctcctgcctcagcctcccgagtagctgggactacaggcgcccgccaccacgcccggctaatttttgtatttttagtagagacagggttttgcaggttgcacagtctagtctcgaactcctgacatcaagtgatccacccacctcagcctcccaaagtgctgggattacaggtgtgagctaccgcaccttgcttatttttcacttttttttttttttgctttatctcctaggccgaagtacagtggcgtgatcttggctcactgtaacctctgcctcccgggttcaagtgattcttctgcctcagcctcctgagtagctgggattacaggcaggcaccaccaaacccagctaatttttgtatttttttttagtagagacggggtttcaccatgttgaccaggctggtctcgaactcctgaccacccacctcggcctctcaaagcgctgggagtgagccaccacgcattacctaacttttcacttttttccccatatattagagatggcagtggtgtgcccatagcagatacaaatacaagtactggtgagggaagtgaatctctacatattatattgtggtgtctacactgagcatcaagagtaattttttttcactgtctctattttttgtatacaaaatgtcatctttaaactgatctttaaaagccattcacatcaatatttctctaagatggggatcagtgttgttgcttttatctgcccttagtaatcctctttaagtatataaactatatgcactttgtctgaataaattcaacatgtttctttctctagtgatctagaacaacttcgaaaaatcagacgacgaagtccccatgaagatactgagtcttttactgtatacttgagatcagatgtggaagcaaagtaagaacatagttctttcagaataaaagtgcaaaccaaattttggattaataaaaatacattttagacagagtcagaattttttaaatgactttttaaaaacaatatttttgtatttgcaaatctgtttatttgtgagttactaatatgtactccttaactaaatatatgtcataatgtgtaagaaaatttgctgttgaatttactctagttgtttagatttcatttggaaaagttcctaagtcctttatgtttctccaaaagcaccttacactttgttgtaagattctcattagagaatttagatttaaatgtgatgtcaataaagtcattaaaattgttcattgtggtgaccatgtgtgtatgcacagatctttggaagtttggggaagccctgaagctcttgccagagagaaaaaattgcgtaaggaagcagaaatagaatacagagaaagtaagtatattcaatttaaagtcaagttaattgaaaaataacttgtagatgagaactgtatctgtaagaactctctagtgctagcatacctgttggcctaggctctgttgcttccagcaaatgctagtttccgttttgggattcaattatttcacaaaaacaggaactgtatttttgttttctcctgtatagctttttgaagatgatgagaggaagagaagctacagtttatcatttttataagacatataactatcaaaacttatctgatttaaagattatacttgttataaaagtgatagaataggaagtaattgctgtattagtctgttttcacactgctataaagatactacccaagactgggtagtttataaacaaaggagatttaactgactcacagttccgcatggctggagaggcctcaggaagcatacaatcatggcgcaaggggaagcaggcgcatcttaacatggtgtcaggcgagagacagcgtgtgtgtaggaggaactgtcaaacacttataaaaccatcagatctcgagaactcagtatcatgagaacagtatgggggagaccatccccatgatccagtcacctcccaccatggcctgtcctcggcacatggggattatggctattataattcgagatgagatttgggtggggacacagagccaaatcatatcaattacttttttacagaagggtctattaactcagctacattaattaattcagcagatatttatccaatacccgctatgaacaagaagctgtgcttggtgtttgaaatgtatatgcaagtaagactcttaggagccaggtgtggtggcacatgtctatagtcccagctacttgcctgtaatcccagctactcaggaggctgaggtgggaggatcacttgagcccaggagtttgagaccaccctgggcaacatagacataaatggggtgataccatacatattgtacatcttgctctttatagatagtggtataatcataaccgttttccatatctacatatagaaatctacctcattctttttaacagttgtatagtaccccattgtatggatgtagcaagatttatgttcttcagtttttcactgttagaaagaatacatcaataaatatttttatttttttaacgtgagataattgtgaatatttacataggattgagtgttaataatacaattttaggatcaaatggcataggcatttaaaaatttgatagatcctaaagaattactctctgaaggaaatatggtaccaatttacatttacaatcacagtgtatgagggagactattttttcatacccttgcccatgctggatattaacaagattttaacttttttgtgtatttgatgggcaacagatggtacctcgtttaattttgaatatctctgactactactgaggttatcttctatgtatagtggtttttcttagttcttctgtaataatttttatatgttttgttcacttttctattagattgtgtgtctcttaaaattgatttaaataagtttttggtggattttaaccaaaatctaaccaagttagtttcatatgttctaaatattttctaacagtctatcttgaaatttggtttctcctctttttagtagggaaatttcaaacatattcagaagtgcagagaaaaacataataaccttttaatgcccatcatctggctttacagctaccaacaacatggccagccttgtttaatgtatatccctctcactaaccttcactctactggattactttgaaaccaggtccagacattatatcattttatttataaatattccagtatatattaaaaggtcaggatgtttgttttagtcagttcatgtgatggtgatggttgaactgttttagaaaagttaactatccattgcctgtagtaagctgtcagtcttagtaatcctctcatttgccctttggttgaaggtctaggatgttctcaaatagctttaattctgacaaagaaagtgattgaccttctgttgatgattccttttcttgacaaaactgaaaatagtatgtctcttttcagctaacctagtcaggaggaataaggagtatatttgtgtgacctggaatatataatattaaatcatctagttgttgaataagtatagttttccttgtaaaatccaagttctttaaatcattggtttggcattttcaaaagtttgaaggagacagtgaatcctagtatcaaaggatttttggcctcagaaaaagttgttgattatttttattttattttatttttcgagacagagtcttgctgtgtcacccaggctggagtgcagtggcgcaatctcagctcactgtaagctctgccttccgggttcatgccattctcctgcctcagcctcccaagtagctaggactacaggcacccgccaccgcgcccaactaattttttgtatttttagtagagacagggtttcaccgtggtctcgatctcctgacctcgtcatccgcccacctcagcctcccaaagtgctgggattacaggcgtgagccaccgcacctggcgattatctgtttttttttaagagatgaggtctcactatgttgcccaggctggaatacagtggctattctcaggtgcaatcatagtgaattatagccttgaactcctgggctcaagtgatcctcctgcctcagcttcctgagtagccaggactacaggtgtgtgccaccgtgtctagctgacaatccacagatattataaagaggactgcacttaaattaacagaagtgaagtatttactttcaatggaagaaatacatactggggacagatagtcctggaaattctggtgtactattcagttaatggtttccattgagtttctttataggtaatacaggtactaacacaggatgcaatcagatagggcatattccattggggaattagatattgccagtgcagttatatagttcttttactcttgggcacttatatatggtaatgtatcaggattaaagtagagatcgatgtactagtatttatgaaaaatgtatacatatttttctttgataatcaggctgactttattgttatctgttaaacgactaacagattttattaagcatcgtgaggtttctcagaagaatatcattgctgctattccctttctggtttgatagaacaatttattttttagtgttcctacttcttatcaatgacactgatttttattagtattagaaagggactgcacttgcttagggtttgagaagttaataaattttgccttgtatggctgttaaaagccctaagtttgttcctttttttttttcttttcatcttctcttttggtttcttgacagtgcattgcaatttagtttttccaacgtgaactaactgccagttcattttaatctttcttaccaccctatttttaatttaaggccctttaaccaaagagagcataaagggtcccttggcattctacatcagggtcagtgtccacaaattgtttatttctagaagtctaattctaaatttacctattaattctgtggggttttttttgtttatagttttggatcttagtgtaatcaattttaatagaggatggcttcctggatagcttacaacaacctatgtccctggctcttaataaataacttttgccggtgttacggcatctgtcttcagtagccagagttggctaactatggcccgtggaacaaattggtctgctgcctgtttttgtatagtttataagccaagagtggttttcatatttttaatgactgacaaaaaagcaaaagagtaacaatattttgtgacagatgaaaattaaatgaaatttaaatttcagagtccacaaataaaattttattgggacgtagccatgatcttttatttacatattgtctgtggctgcctttgcactaccaacagcagagttgagtagctccgacagagactgcgtgtggtgctcctgtcactttgcactgctactcagttacaattcagtaacagttataattcaacagtatttcaaatgtcataggtatccttgtacatgaccttttttttttttagtatgagtgcatacctgtctggtgagtaagaaaagtagacatctagtgttgtgcttttaagtcacagttgagcatggattattttttattgaattagatggcaaagtactgtgtctactatgcagtgacaccatagctgagttaaaggaatacaatatatgttgacattactagattaatcaatcatcacagtattcccaactcacaggagtgtaacaatcagaaaaactagagaatttaagatggaatatattacagcagaatttgttcacaaaaatagaaaatgaaaatgaggctgcaaccaaagtttggtttctgagtggcttattagtcaagcaaagaaagtgggtttctaatggcaagtaaattaagtcctgtttaatttaagcagctgaagaaatgtatccaggactagtagtctttaggcaagactagttgcttcaagagttgaggacactgaggacagacatcagtagtcaattaaaaagcaaggcaaattattttgaatgatgttccttggctcttgataagttgacctgtgtaccaatactatttgaggagtgagtgctgagtttgaagagactggagaattaccctttgtgaatagtgtatgtggagcaaccacaggcaagaatttattttattttattttatttttgagacggagtctcactctgtcaccaggctggagtgcagtggcatgatctcagcacactgcaacctccgcctcctgggttcaagtgattctcctgcctcagcctcccgagtagttgggattacaggtgcgtgctaccatgcccggctaattttttttgtatttttagtagagatggggtttcaccatgttagccaggatggtctccatctcctgatcttgtgatcctccctccttgtcctctcaaagtgctgggattataggcatgagccactgcgcccagccacgtgagaatattttcaaagaagatgtgaaaatactaattcagtaaacctgatgtggaatctgctaagatgtcttatatagatgatggtggtaaaaatacatgtggagcagaaaaagccttagttggacaaatttataaagtttgtgaaaacataagatatttaaagccttttcatcagtagatacttcccagaaaatatttgtcatgagtaggaactttgtggaaaatgcttaaatcttgtttgctgttgaaccaatagtatcacctttgaacttgtggacttaaccactgaaagaaatagaagctgataatcctgacttgtccttctacactgcatttcagtggtttagcagttttactgccattttttgagctcaggattgaaaaattcaaaatggaaatttttctgaataagaagacccacctgtcaaccactattatcaaacactgagtggcttagaaaattaggttttgctgcagacgttatttttcttaatgcattcagtgtaaaattacaggggaaaacagtgcttaaatacaaaacttactctgctgtgaagtcatttcaacagtagatacattatttgaatcaaagtaatgtcagtcagctttatgtacttcccatgctgttaaaagtttaacacaagcactcagatccgcagtggcagtggtgtgtcctgtctgcggagagccaggccagagacaatgagcaacacctcagagaacacgagggcgtgccccgaagccacccacccttccgactgcggcagctgctgacccgctgttgccatgacctgcaggaaagccaatgaggagggcagttggaagaaattcttctggaactcagagaagaaggagtttttaggcaggactggtggcagttggtttaagatcattctattctacataatattttatggctgcctgactggcatcttcatcggaatgatccaagtggtgctgctcaccatcagtgaatttaaacccacatatcagaaccacatatcaggacccccaccaggattaacacagatttctcagatccagcagactgaaattgcctttcatcctaatgatcccaagcactgtgaggcatatgtgctgaacgtagttaggttcctggaaaagtacaaagattcagcccagaaggatgacatgatttttgaaaattgtgacaatgtgcccagtgaacccaaagaacgaggagactttaatcaagaatgaggtgagcgaaagtctgcagattcaagcttgagtggctgggaaattgctctggattaaatgacaaaacttacagctacgaagagggcaaaccacatgttattataaagctcaagtgagttctaggcttcaaacctaagtctcccgagaatgagtccttggagacttacccagtgatgaagtataacgcatctgtgtttcctgttcagtgcactggctagcaagatgaagataaggataaaaatagaaatgtggagtattttggactgggcacctaccttggttttcctctgcagaattatccctactatggcaaactcctgcagcccaaatacctgcagcctctgcttgttgtacagttcaccaaccttaccatggacactgaaattcgcctagtgtaaagcagatggtgagaacattgggcacagtgagaaagatggttttcagggatcctttgatgtaaaaattgaagttaagagctgatcacaagcacaaatctttcccgctagccatttaataagtttaaaaaaagatacaaaagcctgttagtcttgaacaaactgtcatatgtatgggacctacacttaaagcataatctatatgctttacacttgctttctgcatttaattggttagaatgtaattaatgtaaactaaagtgtagcaatagcaacaaaatattctactgtaaatgacaaaagaaaaattgagccttgggatgtgctcatttttactgtaaattatgattccataagtgacttgtaagcagtgtttctggcccctaagtattgcctcctatattttatttaatgtatagtactataggtgcatactctggtcctttttcaagccatgtgttatcgtatctgttttgtactttatgtgagcaggttttgctgtccaaggtgtaaatattcaatgggaatgaaactggcatggtcttttttttttttttttttgggctctttcaaagataatggcccatcaatgagcatctttaacatattctatagtcttttcctgtggtgttaggtcttactttattattattttttctcctgggaatgggacagggatttgtcatgggggaactgccctttaaattttaagtgacactacagaaaaacacaaaaaggtgatgggttgtgttgtgcttgttttgaatgctgtcttgacatctcttcccttgtcctctagtatgttctaaagctgtgtctgagatctggatttgcccatcactttggctagtgacaggcctaataaatttgctttgtacattttcttttactttccttttttcctttctgggggcatcatgctgatggtgtgtctttatgagtgttttaaccattttcatggtggaagaattttttatttatgcagttgtacagttttatttttttctgcaagaaaaagtgtagtgtatgaaataaaccacagtcacttgtttgaaaataaatctttattttgaactttatacaaagcaatgcagtactccatagactggtgtaaaatgttttctactatgcaaagtccatgttctaataattgccaggagtacagtgctcttgttgatcatgtattcagtcaagttaaaacaatggacaataaaagaatgaatacatgaaaaaaaaaaaacagaagacatctgcagcagatatattttccaagcccaacctatagttccagaagtgtttttcagatttccatgcaagtgcagaggaaatttacatatttcaaaatccattaaatagtgcagttgagcagctttctcctgacttcaattggaagtgattagtcgtcaatgtaagaagatgctaaaaggcaaatatcaacaagaatttcatagaattctataaatgctttcaaagcaatgaatatagttatttaaaattatgtttatagatttatatcagcatttggcagtacctatctataagattttgaatatgaaatagtaacatatcagatcatcatcaatagatgaacatttacaattaattttgatgataaggaatactaactgaatcccaattaagtgaaatattttatcctatccccccaaaaagaattctgttcttctcattagtagacctgtattacaaagaattgcactcacatatttttattatattttaaattttgtcaaaaaatttcatggaaatttgtagttatttcttgctataccttcatcatgtcctttatattacctcttggcctccaaagcatgaaatatttgctatctagctgtttagtcagttctcgtattgctataaagaaatacctgagactgggtgatttataaagaaaagaggtttaattagctcacagttctgcaggctgtatagaaagcatagaagcttctggggagcctcaggaagcttccagtcttggcggaaggcaaagatggaacaggtatcttacatagcaggagcaagagagagatgggggaggtgcctcacacttttaaatgaccagatctcatgagaacgaactcaccagtcgtgaggacagtaccaagagggatattgctaaatcattcatgagaattcacccccatgacccagttacccccccaccaggccccacctccaacaattggatttcaatttgacatgagatttggatggggacacaggtccaaaccatgtcaccagccctcttcgaaaaaagtttgccaaccctatttcaatggtttcgttaggattccaccccattttatttatttttgttattagtaacctggaaagaagctatgaaactggaaggatgtaactagaagccttggagtataaatatttaggaggattctaaattatttgactatctcagttctgcacaggaccaaggcttagaaatgacaatatttccttctccagatgagttggcaaaatttcaaagtggaaattgtgagacaattatggtcaataacccaggaagaaaagggatggagggagtttcttgagagtataggagttcattaccaggaggggagcagtgggataggaagatcaaggaagagggaagagggagaagaagatatgcaaggaaagaacaaagtagcagtgctcaaactgtcctaatgttggtcaatggaagcacctcagttggctcctaagtccctttgtcataactctagtatcatggcgtccttactttcaggaataatatgtttcagattcatcttgtacgtttcctgtcctgggttggtaatcaactatttctaaaaggagccacttttctttttactggaaaataaaatcaagttaaagtaattacatacttgatttattctatgtctctacacacatagagaataaagtgtagtttcaaatagcagtattaatactaacaatgtaatttaagatttctttgcttttctttgtatctttagtatatatatcccactagagatgtatagttcaatttctgtgtgttaaagtcacttaaaatttttctatatagaaatatcatcagtagatatacagttaggctcatttgtttcattttgcttctgatttttaaaaataattttgtttttattttataattgcctaaaaatttacatgatttcttagtcaaacctacagaacagatatttcagagaactctagcttccatctctgtcctttccactctaagtcctctctcttgtataagtaactgttttaaagtttttgggttttttttttaatacttaaaatataagaaaataaagccaggctccatggctcatgcctataatcccgggactttgggaggctgaggtgggaggatcacttgagaccaggagtttgagaccagcctgggcaacattagcgagaccattttccttaccaaaaatttaaaaataaaaataatattttttaaaaaaacgtacacatttgtattaaacgccatacccttcataaataaggcatactatacatactttctggtcttgctttttttttgaggcggagtctcgctctgtggcccaggctggagtgcagtggcacgatcttggctcactgcaacctccgcctcctgggttcaagcaattctcctgcctcaacttctcaagtagctgggactataggcacatgccaccatgcctggctaattttttgtatttttagtagagacggggtttcaccatgttagccaggatggtctcgatgatctgaccttgtgatccacccgccttggcctcccaaagtgctgggattacaggcatgagccaccgtgcccggctgctcttgctttttttacttaactctgtcatgaggactatgctatagcggtaaatagagacatttcttcatttattttataatactctgttttttgatataccgtaatgtattcaatcattcccccataggacgtttctagtgttttgctattaaaacgataccatgagaagccttgtaaataaaagttaaaagaattttttgtaatacaaaaatttgagaaaacacagtaatagaaaaatactctctcatatttttcaactttgaggtaaaaatgaaggacttgtttttgtatcaggcttagttaacttttataaaggtaatattgagaaaagaatcttaccaaactgtctttatctcattgcaaatccagattttcctgcctccttttttattgtaaaaaacacatagcccaaaatttaccatcttaaccatttttaaaggtacagttcataagtgtgtaagtatattcacattgttgtgaaacagatcttcagaggtttttcatattgcaaaactgaaacactatacccattaaataactaccccccatttccctgccaccccccggtccctggcaaccaccattctgctttttgtttctattaatttgaatactttagatacctcatataagtggagtcatacagtgtatgtccttttgagatgggcttatttcacttagcatagtgtcgtcaaggtttatccatgttgttgcatgtgacaggatttcctttttcaaggctaaataatactccatcatcatatgtatataccacattttgtttatccattcattcatccatccatggacatttgggttgcttcacctcttgactgttgtgagtactgctgctatgaacatgggcatgtaaatagctttttgaggccccacttgctattctttggacgtatgtccagaagtaggattgctggattatatggtaattctatgttacagttttttttaggaaccttcatatttttttccataacaattgcaccattttacattcctaccatcagtgcaaaaaggttccagttttgacacattgccaatccttgttattttctgtttcttgtttttttaatagtagccatcctaatggatgtgaggtgatatctcattgtggttttcatatgtatttctctgatgattagtgatgttgagtatctttccatatgcttgttggtggtttctatataatctttggagaaatgtctattgaaatcctctccccattttttaatcagtttacaaatccaaattttttataacttaatatttttgctgttagctagtagcgcatatttaacatagtcctgaagagaatatcatgttcatctaaactgtgactggtaagaatatctatgacctaaatttattttgttattcttacagggctatttagaaaccaaaaaatattaagagaatacagagatttcttgggaaataccaaggtatggatatctttgtaataatgtgtgtgtttgtgttgcacagcaaaattctaatatcagtccattgtaaaattctagcatgtctgtgatctcaatctaagattttcttgagtacattgtagttcactgaattatagtcaattcattcatttccgtctgattttcctttttttttttttttgagacagagttttgctcttgttgcccaggctggagtgcagtagtgtaatctcggctcactgcaatctccgcctcccgggtttgagcaattctcctgcctcagcctcccgagcagctgggaccacaggcatgccaccatgcccagttaatttttgtgtttttagtagagacagagtttcaccatgttggctaggtgggtcttgaactcctgacctcaggtgatgcgcctgcctcggcctcccaaagtgttgggattacaagcgtgcccggcctgattttcttgaaatttaaaacatttgtacataagttttctttaaagtcataaccatgttatgaaccttaagcatgtagatatagatgaggaagactttattttcttaggttttagtgagatttatatccgtcatacacactcttaattttctttagcctctctctttctgctcctaactctggttcaacattcagactgccaactctgtgcttgtatccaagaagcttagcccttggagaagaaaattacacagccagtgtgattgttctttcttccttatatgactatacaaaatcaatggatactcaatattatttgacagtcttactaaacttccagagtatgttcaccttcccactctttgaaatagctattgcatatctttttctttcttgccaacagcctcactctttactcttcagctgttgactttgcttcatattttattgaaaaaataggtgtaatttcataaaagtacctcatctttttcatcacctcatcttttcatcaccaaatttactaactcatctacacatgtgacaaaatactctgctttccttcctactagaaggaaattaatattgggacacatgtagaaagtttgcctctactgttctacctcttattttctcctgaacctaatccaattgggctttcaaccccaccaccccactgaaatgacttaccaaagtccccagcacctttaagatgccaagcagtctgtggccaagttgactttccatttaaacttggctgggaggaatctcctatcaagaagttaatgtcatatttggataaaaggctacctatgcacattttcttctctctggtggcatttgagacattgcacccattttgcaaagtttagacattggcagtgatgataattttagccaaatcttatttgatatgctttccttttccatttattatcttcaagacctcttaatttccatttcccctttgatcactgcatttctggcaccccagtactgccctgaagatgtggactctcctctggtagagccttcatatgtcttatgagccagcattttcactctcatgcctcaagggctattgccattgcctcttgtgctgggataacttaggctggtgagacctgcctcctgggaagattcactcctcgccttcacatctgtttcacatggagaatcatcctcaccagattttctaatagtagctgttgacttatgaaatctttgttacttcagaagattaatactggtcaacttttgaatattccatgttttgaaatgatttttttttgctattacaacgtttttttgctgggacattaggataaaactagtatttcatttccctctactgtacccctattccctttaggaatggttgttctctcactgaagatggttgctttccttctctaaaacatagggctaatcctgtttgcaaaaattaaatgccttcttttttttttttttttttttttttttttttttttgttatttctgacccagacacttgtttttccaatatattcttatctcatgagaactccaataatgagatatatgaaatcacagtgttctgggtctgctcctctggtatttaatttcttatataataatttcccctttaatacctttctactttcccatgccttcccttctatttctaattcatgggtttcttgatatagtacttcagagaattggaagtacctttatctctgcttaatatatttaactccacaatagtatcaccttgaaatgcaccaataatgctttgaacaatttatgctccttttcctggtagttctctctgaaatctatccaaattttctgcacttgtcccaatattaaagaaccttgtttattgtgaatgttctcaaagatatataaaaatagaaaaatagatattggctatccagtttcattaatttctaacattttgctgtcctggtcttcaaaaaggggcagttctccaattgctctgattatggaattttttaatattttattttattttatttttgagacagagtattgctgtgttgcccacgatctcagctcactgcaacctccgcctcccgggttcaagagattctcatgcctcagcctcctgagtagctgggattacgggcacccactaccacagccggctgatttttttgtattttagtagagacggggttttaccatgttgtccacactggtctcaaactcctgagctcaagcagtctgcccatcttggcctcccaaagtgctaggattacaagcgtgagccactgcgcccgacctgattatggaatttttgagtagcttttacaggaagcttcccaagcaggttgtggatcctggctccttgtgatctcttgtttttctagatttttattctcttgttagagttccttggaccttatcattatttctagtttctaccaacacatcttcccgttttctacagccttctttattagagtggtttgggccgagtgaatctttttccttatttttcttattatttcttattctgatcttaaagatctcatttcctttccctgttttgcccctcccatgagttcccaaacctttcttctaaagaaatcttatttttcaccgtaagcagcattctattgttcccataataatttcattgagttttttctctattcatccaaataatacaatatattcttattttaataaaacatacattctgtttgttatcaataaacagtataattcagaaatctagacccatagtcagagtttatggcttacaaatcgaagtaaaagttgagatcacatggacaaggtttatccctgtgtagttccttctcttagctctgaaggcaggtcaatacagaattttgggtgtctgatttcacacattcttagagcatatgaatttcagcacagtgcatttttctactttattactagtttttatgtagccagctcagatcctttctggaagtaggcaggacatgaattacaaggaaacaaaacaaacaagtttctggaaagagacccagatatgctttcggttttaatctttccactttctaaacaagaacttctagagaaaaataagtaaatctaattcagaagttttgatagaggaaaatgttctggtctgtcaaagccaccagttacagtgcttctctgcaaaattttggaggtattaaaaaaagtttttgtttttttacagccacgctccagaacagcatcagtgttttttaagggaccaggaaaagtggtgatggttgcaatttgcatgtaagtactgaaaaataagctttgtgaaatagaatatattcttttaaatatgtatatccttaaatatgtaaatttattacatggtagctagctatagagtttgaggtttattttgttttaggaggaaattgaataagtctttattattgtcagtaaagtggtggggaaagagcatgaattcatatagataaccatgctcattctctgtatatttttgatgtagttagatctaagaatagttgctacctgaaaatcctttcttgtttttattggagttgatagaagtcttttttaaagaagttagctaaaccaacctgggttacagctactgaagaatatctttgtgcttattatctttattccacttatcttggaagaacataattatttgttcttgttatttttgcctcctctttttttttttttttgagacagagtcttgctctgtcgccaggctggagtgcagtggctcaatctcagctcactgcaatctctgcctcccgggttcaagccattctcctgcaacagcctcccaagtagctaggattataggtgcgcgccatcatgcccagctaatttttgtatttttagtagagatggggtttcactacgttggccaggatggtctcaatctcctgacctcgtgatctgcccacctcggcctcccaaagtgctgggattacaggtgtgagccactgagcccggccttgccttcccctttttccctctatcttcttgattcctattgttttgttcaccttttgtctgtttttctgactaatctattttaggatggatgaaatcattcaataattcattagttcttttattcttaaatatatatatgtaaaatatgtatcagtgtgataggatatgaaaatataaagatataatacataattctttaaggattggagggacactaaactagaggaagacatttataatacagacaaggaataatgctgtcataactacaatagtggtggtacagatagacgtagacagtttcaacttcttagaaggtatgttcaaggatagtgaccaggtttctggctgtacaattgtgtaaataatgtaccattcactgaggagagtactggaaggaggagcagggtgggagcagagaaaatgatgagttcatttttgagctggtggtatgtttagggcacccaggtggagataagtcaacagggttctttccaccagtaatacagggatagtgattatagcttttctcattggagggatgtatgtgtgaaaagtgcttaacatagtacctgctctaagatatgtacttaagaagtattattgttaatatatattggtctgaagctcaggagagaaatctgagttagaggtttgatagtttttagtatatagatgataactaaagccataaaagtaaagatcacctgaggaatgtatgtatatatagtatcaggaataaaaagtcctcaggaaaaattccttgaagaatgttaacattaagaaaaaggtggaggctttgggagacctcgtgatccgaggtcaggagattgagaccatcctggctaacacggtgaaaccccgtctctactaaaaatacaaaaattagctgggcgtagtggtgggcgcctgtagtcccagctacttgagaggctgaggcaggagaatggtgtgaacccgggaggtggagcttgcagtgagccaagattgcgccactgcactccagtctgggcgacagagccagactctgtctcaaaaaaaaaaaaaaagaaaaagaaaaaggtggaggaaaaagtgcctgcagaggagattgaggaggagtaaggagaaaagtagaaagaaaaccaggagtgtattagtccattttcacgctgctgataaagacatacccaagactgggcaatttacaaaagaaagaggtttaattggacttacagttcccgtggctagggaagcctcacaatcatggtggaaggcaaggaggagcaagttatgtcttacatggatggcagcaggcaaatagagcttgtgcagggtaactcccatttttaaaaaccatcacatctcatgagctcattcactatcacaagaacaacatgggaaagacccaccctcatgcttcagtcatctcccactgcgtccctcccaaaacatgtgggaattataggagctacaagatgagattttgtgggagacacagagccaaaccatatcaaggagtgtcaagaaagccaagggaagaagcgtttgttttttttttgtgagacggaatctcactctgtcgccaggctggagtgcagtggtgcaatctcggctcactgcaacctccgcctcccaggttcaagcgattctccttgcctcagcctcctgagtagctgggactacaggcacacatgttttaaggaaatagcaggcctggtacaggcacacacctggaatctcagcactttgggaggctgaagcaggaggattacttgagctcaggaatttcagaccaccttgggcaacatagtgagaccttgtacctacaaaaaaatttttttaattagctgggcatggtgggtgatgtgcgcctgtagacctactcaggaagctgaggcaggagaatcatttgagcccaggagtttaaggctacagtaagctgtgattataccactgcactccaacgtgggcaagaacaagaccctgtctttaaaaaataaatagccagctagggggtggcgggcaagatggctggataggaacagatcctgtctgcagctcccagtgagatccatgcagaaggtggataacttctgcatttccagctgaggtacctggctcatctcattgggactggtcagacagtgggtgcagcccatggagggtgacccgaagcagggtggggcattgcctcaccggggtagtgcaaggggtcggggaactccctcccctagccaagggaagccatgagggactgtgctgtgaggaacggtgcattccagcccagatactacgcttttcccatggtcttcacaacccacagaccaggagattccctcgggtgcctacaccgccagggccttgggtttcaagcacaaaactgggcggccatttgggcagacaccaagctagctagactagttttttttcatactccagtggtgcctcgaatgccagtgagacagaaccttttaatcccttggaaagggggctgaaaccagggagctaagtggtctagctcagcagatcccacctccagagagcccagaaagctaagatccactggcttgaaattctggctgccagcacagctgtctgaagttgacatgggatgcttgagtttggtgtgtgttggggagttgggggttggggaccaccattactgaggcttgagtaggcagttttcccctcacagtgtaaacaaagccatcaggaagttcgaactggacagaacccaccgtagctcagcaaagccactgtagccagactgcctctctagatttcttctctctgggcagggcatctctgaaagaaaggcccagcagtcccggtcaggggcttatagataaaactctcatctctctgggacagaaaacttgggggtaggggcggctgtgggcgcagcttcagcagacttaaacgttcctgtctgctggctctgaagagagcagcggatctcccagcacagcgctcgaggtctgctaagggacagactgcctcctcaagtgggtccttgacccccatgcctcctgatggggagatacctcccagcagggatcaacagacacctcatacaggagagctccagctgacatctggcaggtgctcctctgggatgaagcttccagaggaaggaacaggcagcaatgtttgctgttctgcagcccctgctgttgatacccaggtaaacagggtctggagtggacctccagcaaactccagcagacctgcagcagagaggcctgactgttagaaagaaaactaacaaacagaaaggaatagcatcaacatcaacaaaaaggatgtccacacaaaaaccccatccaaaagtcaccaacatcaaagaccaaaggtagataaatccatgaagatgaggaaaaaccagtgcaaaaaggctgaaaattccaaaaaccagaacacctcttctcctccaaaggatcacaactcctcgccagcaagggaacaaaactggacggagaatgagtttgacgaagtaggcttcagaaagtgggtaataacaaactcctccaagctaaaggagcatgttccaacccaacgcaagaaagctaagaaccttgaaaaaaggtaagagaaattgctaactagaataaccagtttagagaagaacataaatgacctgatggagctgaaaaacacagcatgagaactttgtgaagcatacacaagtatcaatagccaaatcaatcaagtggaagaaaggatataagagattgaagatcaacttaatgaaataaagcataaaggtaagattagagaaaaaaatgaaaaagaatgaacaaagcctgcaagaaagatgggactatgtgaaaagaccaaacccacatttggttggtgtacctgaaagtgactgggagaatggaaccaagttggaaaacactcttcaggagattatccaggagaacttccccaacctagcaagacaggctaatattcaaattcaggaaatacagagaacaccacaaagacagtcctcgagaagagcaacctcaagtcacataatcatcagattcaccaaggttgaaatgaaggaaaaaatgttaagggcagccagagagaaaggtcgggttacccacaaagggaagcccaccagactaacagcagatctctctgcagaaaccctacaagccagaagagagtgggggccaatattcaacattcttaaagaaaagaatttttaacccagaatttcatatccagccaaactaagcttcataagcgaaggagaagaaaagacaagcaaatattgagagattttataaccaccagtcctgccttacaagagctcctgaaggaagtactaaatatggaaaggaaaaactggtaccagccactgcaaaaacataccaaattgtaaagaccattgacactataaagaaactgcatcaactaatgagcaaaataaccaactagcatcataatgacaggatcagattcacacataacaatattaaccttaaatagaaacaggctaaatgcccctgttaaaagacacagactggcaaattggataaagagtcaagacccattggtgtgctgcatgcaggagacccatctgacgtgcaaagacacacataggctcaaaataaaggaatggaggaatatttaccaagtaaatggaaagcaaaaaaaaaaaaaaaaaagcagggttgcaatcctagtctctgacaaaaaagattttaaaccgacaaagatcaaaaaagacaaaggtcattacatagtggtaaagggatcaatgcaacaagaagagctaactgtcctaaatatatatgcacccaatagaggagcacccagattcataaagcaagttcttagagacctacaaagagacttagactcccacacaggaatagtgggacactttaacccctcattgtcaatattagacagatcaacaagacagaaaattaacaaggatattcaggacttgaactcagctctggaccaagcagactaatagacatctacagaactctcaaccccaagtcaacagaatttacattcttctcagcaccctgtcactcttattctaatattgaccacataattggatgtaaaacactcctcagcaaatgcagaagaacagaaatcaaaacagtctctcagaccacagtgcaatcaaatgagaactcaagattaagaaactcactcaaaaccgcgcaactacatggaaactgaacaacctgcttctgagtgactactgggtaaataactaaattaaggcagaaataaataagttccttgacaccaatgagaacaaagacacagtgtaccagaatctctggaacatagctaaagcagtgtttagagggaaatttatagcactaaatacccacaggagaaagtcggaaagatctaaaatcgataccctaacatcacaatgaaaagaactagagaaacaagagtaaacaaattcaaatgctagcagaagacaagaaataactaagatcagagcagaactgaaagagatagagacaccaaaaacccttcaaaaaaccagtgaatccaggagctggtttttttaaaagattcacaaaatacatagaccactagccagactaataaaaaagaaaagagaggagaatcaaatagacaacaatgaaaaatgataaaggggatgtcaccactgatcccacagaaatacaaagtaccatcagagaataatataaacacctctacgcaaataaactagaagatctagaagaaatggataaattcctggacacacacaccctcccaagactaaaccaggaagaagttgaattcctgagtagaccaataacaagttctgaaattgaggcagtaattaatagcctatcaactaaaaaaaaaaaaaaaagcccaggactagacggattcacagccaaattctaccagaggtgcaaagaggagctggtaccatttcttctgaaactattccaaacaataggaaaagaaggactcctcctcaactcgttttatgaggccagcatcatcctgataccaaaacctggcagagacacacaaaaaaaagaaaatttcagaccaaaatccttgatgaacatcgatgcagaaatcctcaataaaatactggcaaagcaaatccagcagcatgtcaaaaagcttatcaccaccatcaagttggtttcatccctgggatgcaaggctggttcaacatatgcatcaacatatgcaaaataataaatgtaatccattaaataaacagaaccaatacaaaaaccaaatgattatctcagtagttgcagaaaagcccttcaataaaattcaacaccgcctcatgctaaaaactctcaccttaaactaggtattggcagaacgtatctcaaaataaaaagagctatttatgacaaacccacagccaatatcatactgaatgggcagtagctggaagcattccctttgaaaaccagcacaagacaaggatgctgtctctcaccactcctattcaacatagtattggaagctctggccagggcaatcaggcaagagaaagaaataaagggtattcaaataggaagagaggaagtcaagttgtctctgtttgcagatgacatgattgtatatttagaaaaccccataatctcagcccaaaatctccttaagctgataagcaacttgagcaaagtctcaggatacaaaatcaatgtacaaaaatcacaagcattcttacataccaataatagacaaacagccaaatcatgagtgaactcccattcacagttgctacaaagagaataaaatacctaggaatacaacttacaagggatgtgaaggacctcttcaaggagaactacaaaccactgctcaaggaaataagagaggacacaaagaaatggaaaaacattccatgctcgtggataggaataatcaatatcatgaaaatggccgtactgcgcaaagtaattaatggaatcaatgatatccccatcaagctaccattgactttcttcacagaattagaaaaaaaacttctttaaatttcatatggaaccaaaaaagagcctgtatagccaagataatcctaagcaaaaagaacaaagctggaggcatcatgctgcctgacttcaaactatactacaaggctgcggtaaccaaaacagcatggtactggtaccaaaacagatatatagaccaatgtaacagaactgaggccttagaaataacaccaaacatctacaaccatctgatctttgacaaacctgacaaaagcaatggggaaaggattcccgatttaataaatggtgctgggaaaactggcaagccatatgcagaaaactgaaactggaccctgtctttataccttatacaaaaattaactcaagatggattaaagacttaaacgtaagacctaaaaccataaaaaccctagaagaaaacctaggcaataccattcaggacataggcatgggcaaagacttcatgactttcacaccaaaagcaatgggaacaaaagccaaaattgacaaatgggatctaattaagctaaagaacttctgcacagcaaaataaactattatccgagtgaacaggtaatctatagaatgggagaaaatttttgcaatctatccatctgacaaagggctaatatccagaatctacaaggaacttaaacaaatttacaagaaaaacaaacaactgcatcaaaaagtgggtgaaggatatgaacagacacttctcaaaagaagatatttatgcagccaacaaacatatggaaaaaagctcatcatcactggtcattagagaaatgcaaatcgaaaccacaatgagattctatctcacgccagttagattggcgatcatttaaaagtcaggaaacagcagatgctggagaggatgtggagaaataggaacacttttacactgttggtgagagtgtaaattagttcaaccattgtggaagacagtgtggcgattcctccaggatctagaaccggaaataccatttgatccagcagtcccattactgtgtatatatccaatagattataaatcattctactataaagacacatgcacgtgtatgttttttgtagcactattcatattagcagacttggagccaacccagatgcccatcaatgatagactggataaagaaaatgtggcacatatacaccatgggataatatgcagccataaaaaaggatgagttcatgtcctttgcagggacatggatgaagctggaaaccatcattctcagcagactagcacaagaacagaaaatcaaacaccacatgttctcactcataagtgagagctgaacaatgaaaacacatggacacagagaggggaatatcacacactggggcctattggggggtgggtggctaggggagggatagcattaggagaaatacctaatgtagatgacgggttgatgggtgcagcaaaccaccatggcacatgtatacctatgtaacaaacctgcacattctgcacatatatcccaaaacttaaattataaatttaaaaaataaataaacattgtttaaaaaaagaagaaaatagtgtcagatgctcccaggaggttaagagaaatgctaaaatatttccaggaatttagtagtatggaatggtaggtggtattgataagatgaaaactgtgacagacagaataaatatgatgtttttaagaagttatctgaggtggaggagatgggaaaagggtagctaaaaggggacatacagttctctcatttataaaatgggggtgttaatatttgtataacagacttgtaatataacatggtaactcactagcataacgtctgagataaatcatattagtcattactgttagtatctgagcagctagtttcctcagagttaactgtttattttggcatctagctgcttctagtatgactctgagactgcttagagtcacctctggcatctgcctccttaagtaaacagattttcactgaagtcttgcctttgacactggcccaatggacagtatcaggtgcagatctgcttttatctacctaaaacacataattttcttttacattttatcttgtccacatatagaagaccatcttttctcaccagttttcaaaatatacttaagtaatttgcttacacatagcatgcctcttaacagtacataatctatattttttcaaatttttactcttgttacctaaacaaagttttttaaggctagggattcttttaattgtacttgttttttttgttattgttgttgttgttttagcgatggggtctcactctcttgcctaggctggagtgcagtggcacgatcatagctcacttcggcctcaaactcctgggctcagatgatcttcccacctcagcctctcagtagctgggactaaaggcgtgcactaccacaccagactaagtttttaaaaaattttttgtagagatggggtcttactttgttgcccagactggtcttgaactcctgtcctcaagccatcctcccacctcagcctcccaaaatgttggcattataggtgtgagccattgtgcttagcctaattttactttcaacagaatctagtgtagagatatacagctgattgagtatgcttttggcttaaatttttgtccaaacctatgctaaattgttttctctttctcttctagcaatggattaaactgcttctttaaatttcttgcctggatttataccggttcagcaagtatgttctcagaagctatacactcattatctgatacttgtaatcaggtgaggactaaagctttttttataagtcaattttaaagtaatagttgtaggctttaatctaaaagttgatctattttaaaactgaatgattccagtagttggcttgtgggataaaataaaagtttacttttcagcaatgaagtgcatagaaatttaatcatagtattttaaagcagattgttatgctttaagaacctctgacaatggaatgtgaagtataacattgtcagtcactgagcagaaatctggtctctgaatatgaattctcaatgactgtaatagtcaatgaatttaaacttttggaataaagatgtaaaatcatatgtaattggttaaaatgctttcacattagattcataatttgaattactttccttggctttgcaaatggagaaaaatttttgtattaatacaattaaaagaccttctaaaccccctgtggcccaaattgtgaaaactagaaacccaaaacttttctaagaatataataaaaatttctgtgtgtgcatcctattacattttaaagagtgtggtatattaagaggataccttttcaatatttacttatttttagtcctgttatgtaaaaactgatttgggagaacttcaatgagagacacaggtaaaataagaatatttaagacaaggataaaaataacgtgaagataaggagcaaggagagcaatattaattaaaaattaagcctgtgaacttgtctcactcactgtcaaatcagatggattaaaacccttcataaaagtaaggaaagaagacaagcgtttgccattagtactaagtatttaccttgaacttaatttttatactcaatatatacttaaatactgtctctataaaattttaccattcaactgtggtatgcagtgggaggagaggggatagggagagatatataacttataatctctattttcttgtaagcttatcgaggaaagttgaaatacagaaatatttgtccatatggcaaggagatatgtatgatgttattagtttcaatattagtttttatttcaaacattgaagacagtgtttaagtgttcattctctatgctattcaggcatttaaaaagaatgtagtagatatctgtgtactgacctggaatgataaccatgataaattgagtaaaaaatcaagttgcaaaatactatgttcagaacttctgctttcacccatgacagactaacagggattgagtttaatcttttgccatagacaactaaaagctagacagtatattggataatagcagcataagaccatgatctctgagagataagaaacaaattatttgaactctctgatctctctggctttttgcttgaacacatatttgggatagtggagcaggatgggaaataacagtctcattgagttgagaagacagaaatcagtgttcagggtgtctgaggtggctagaacttacaaggaagagttccacagaggaaggagctacaaggacaaaaagctatagaagtctacatagggatttccttgaattgaatgtttgctgaatgttaagttacacatgtgtaagatgtgagcatcaatctgggcagagaaccagcagggagcagtaactgactaattcccactgctcacacaaagctaggttacattcaggttctgactagctgacgtaagagagttctcattgattatcgaggccaatggaaggctcaccttaggagtagggctaaattattcttaacgtaaaggctgttctagaaccctccctaacaaatcttcctaaaagttctaaaggatcaagctgatcttcaaataatttaatcacttgccagaacaaagcctcacattctttaataaaggcagcaaaatccaaacactcagtataacattcacagtgtttagcatccaataaaaaagactaatcgccagtataagaagcaggaaaatttgactcataaccaggagaaaaatcagtcggaagcagactaaacagatgatagaattagcagacaaggatattaaacagctatttcaagtacagtcatgtattgaaaggaaaatatgaacataagaagataaatcaaaggtataaaaaataaaccaaatgaaacttttagagctaaaaaaatatatctggtgtgaaaaattcactgtatagaattaacagcacattagacactgcaggtaaaacagtcagtgaacctgaatatgtaacagcagaaaatattcttactaaagccacagacaaaaaagattgaaaaaaatggaggaagccttggtaacctatggaacaatatcaagagtattctgtcaagcatttagggaagaaacaatgctgagtacacagactttcagaaatagagaatgaaatgtttttctactgctttaatgaggctagtataaccctgatgccaaaattttacgaagtcattatgagagggaaaaaaccctacagaccagttattcctcatgaacacagatataaaactccttaaaatataatcagattttattatataaatatataaatatgatatatataaaaatgatattatatcataagtgagtaagatttcaggagtgtaaagttggtttaacattcaaaatcagtaagtatagaaggttaatatgaagaaattaattgcatttctactatcagcaaataaatggggaaggaaattttaataaattccataagtagtatcacaaaatattaaatacttagagataaatctagcaaaagacatacaagacctttacgctgaaaatcataaaatgttgctgagagaaatcaaagaagacctaaagaaatggagagatacaataccgcgttcatagattggatgtcatagatctgtcaaatctccctaaattgatttacagatataatggagttccattcataatatgaacagacttctctgtacaattgacaaaccgaataaattccaaaattcatacggacatgcaaagaacctggaatattcaaagcaatcttgaaacaagaaatttggagaacttcaagacattataaacttatatagaaattaggacagtgagttactggcataaggattgacaaatcaatggaacaaaattgaggatccaacaacagagccacatttacatggcccgtgcctttcggcaaaggtatcaaagcaattgagtgaggaaatgaaactttttaaaacaaataatgttggaaaaattggatccatatggggagaaaaaggaccttgactcctacttcacacactgtatacaagtttgaaatggatcatagtccaaatataaaagttaaaactatgaagattctagaagaaaacctaggagaatatcttttagacctggtaggcaaagatttcataaataggacacagaaacaatatcataaaataagatttacaaattcaacttcatcaaaattaaaaacttttgctcattgaaagacatccttaaggaaataaatacgcatagattgggagaaaatagtcacaaagcattctgacaagggactggtatccaggattaagaaattccacgattcagtaataaaatgagaaccagttttttccccccaaggataaagatttgggcaggtacttcacaaataaggaaacatgaatggtggccagtggacacctgaaaatgtgctaacaccgttaatgatcaggaaatgtatattaataccacaagacatctctgcatatccactataatggctacaagtaaaaacctgacagccaaatgttggtgaagatgtggagcagccagatctcccagtcattgctggtgtattactaaaatggtacaaccactctggaaaatatttggcagcctcctataaacatatacttatcctgtgacccaccaattccacttctaagtatttacccaagggaagtgggaatgaatggtcccaaaagatttgtataagaatgttggctgggcgcggtggctcacgtctgtaatccgagcactttgggaggccaaggcaggcagatcatctgaggtcaggaattcgagaccagcctggccaagatggtgaaattccatctctgctaaaagtacaaaatagctgggcatggtgatgggcccatgtaatcccagctactcgggaggctaaggcaggagaatcgcttgaacccgggaggcgggggttacagtgagccaagatccgagattgcaccactgcactccagcctggatgacaagagtgactcggtctccaaaaaaaaaaaaaaaaaaaaaaaaaaaaaggaatgttatagcagctttacttataatggctgaaaaaattggaatcaacccaaatgtttatcagcagtacagcagataaacaaattgtggtatactcatacaatggaatattatctggcaataaaagggaatgaagtacttttctgactggcaacatagatgtatctccagcaaggaactttaatttttaatagtttaaaaaaattgggaaaaatggttgcgtctgatgtcggggaggaaagaggcacagggagctttttgggaatgatggaaaggttctgtgtcttcataggaatatatgtttcaagggtatgtgtatttgttaacaaccagaactgtacattctgggccaggtacggtggctcatgcctgtaattccagcacattgggaggccgaggtgggcggatcactggaggtcaggagttcgaggccagcctggccaatacggtgaaacccgcatctctactaaaaatacaaaaacattagctgagcgtggtggtacatgcctgtaatcccagctactcaggagatggagacaggagaatcacttgaacccgggaggcagaggttgcagtgagtcaagatggcaccactgtactccagcctgggcgacagaactagacatctcaaaacaaaaacaaaaacaaaactgtacattcaggatttgtgcatttcattgtatgtgaattttacctcaaaaaaattctccctatgtggaaatgtgattacttagtagatatttgataatagtaaggaattagtattgatttttttttttttttgagacagagtctcgctctgtcacccaggctggagtgcaatggcatgatctcagctcactgcaagctccgcctcccaggttcacaccattctcctgcctcagcctcccgagtagctgggactacaggtgcctgccatcacgcccagctaattttttgtatttttagtagagacggggtttcaccgtgttagccaggatggtttcgatatggtcttgatctcctgaccttgtgatccacctgcctcggcctcccaaagtgctgggattacagacatgagccaccgcacccggccaggaattagtatcgatttttaaaagtctgataatagtcttgtggctgtattttctaaaaagcctagtttttaaagagattcatccaaaatatttaaagatgaaatggtacgatgcttggaatttacttcaaaatattcatgagggagtagatatggatgaaataaaacatatttggttacatatttataattgttaaagcttaatgatggatgatttgagtttttaaaaatgttctatcagggccgggcatggtggctcatgcctgtaatcccagcactttgggaggccgaagcaggcagatcacctgaggtcaggagttcaagaccagcctgaccaacatggcaaaaccccgtctcttagagttttcaaaaagacttcagttaaaaatatttcaactggacctttctgaatagatggaaattgtatttcagaaagttgtttctttcgagacctataatatttttaaaattttaattcattgtaatatttttatgccatatgttttccctcacttcttgagagacttaagtacctccaacttttaaattagacctgtgtctctaattataatgtagttttttatttatttattacttattttttgagacagagtctcgctgtcttgcccaggctggaatgcagtggcacaatctcggcttactgcaagctccatctcccaggttcacgccattctcctgcctcagcttcccgaatagctgggactacaggcgcccgccaccacgcccggctagttttttgtatttgcagtacagacagggtttcaccatgttagccttacaatttctgttacagttcatgttggaaaacttttctgttaaatattgcacatcgtatcatttaatatcaactgagatgaatttattgagcacctgagtttgcaatgtagcaagtgtttagaagaagacatggttctttctctgtcttctttaaacaggttatatgcggttatatgcacataaaacaactagaaagatcttctaaggtaccatttatgcaggtgctggatagtatgatacttaaggaacaccagaaacgtgaagggtgatcatggagtagagagcatttacagtacttcttagccactagatgttaatgttcgttatgctgcaaactaaacaaatgctctgtaggttatatatacgtactgatagagatttatgttgtaaatgtgtagaaaaaggtctggaaggatacatatcaaatataactgtgattctgtcttacctctgaggagagctggttggggtggtctcatttttgttagaactaataaatatggtccatattcattttataaaatagttgacggtatctcacacttcattgcacagccaactgaatattaaggatttttaaatagttgaatgtttattgaatattttaaaaataatataaatacatatatatgtatacatatatacacataatgtgaataatgactgtcacttttaatgtacaggtgtgtattattccattttcacactgctgataaaaacatacccaagactgggcaatttacaaaaaaaagaggtttaattgtgactagggcaggctcacaatcatggtggaaggtgaaaggcatgtctcacatggcagcagacaagagaagagggcttgtgcagggaaactcccctttttaaaaccatcagatcttgtgagacttattcactatcacgagaacagccgaggaaagacttgcctccatgattcagttacctcccactaggtccctcccacaacatgtgggaattcaagatgagatttgggtggggacacagccaaaccatatcttcccgccccagcccctcccgaatctcatgtcctcacatttcaaaaccagtcatgccttcccaacagtcccccaaagtcttaactcatttcagcattaactcaaaagtccatccaaggtgtcatctaagacaaggcaagtcccttctgcctatgaacctgtaaaatcaaaagcaggttagttatttcctggatacaatgagggtacaggcattgggtaaatacagacattgggtaaataccatgtctccatttggcgacattgggtaaatgtctccaaaagggagacattggccaaaacaaaggggctacaggccccatgcaagtccagaatccagcggggcagtcaattcgtaaagctccaaaatgatctcctttcgctccatgtctcacctccaggtcacgctgatgcaaaaggtgggctcccacagccatgggcaactccacctctttagctctgcaggatatagcccacttttggctgctttcaggggctggcattgagtgtctgtggcttttccaggtgcactgtgcaagctgtcagtggatctatcattctgggatatggagggcaatggccgccctctgctcacagctccactaggtggtgtcccagtaggttttctgtgtgggggctcccaccccacatttcccttaagcactgccctagcagaggttgtccatgagagccccgcctgtgcagcaaacttctacctgggcatccaggtgtttcccatacatcctctgaaatctaggcagagatttccaaacctcagttcttgacttctgtgcacccacaggcccaacaccacgtggaagctgccaaggcttggggcttccacctactgaagcaatagctggagctgtaccttggccccttttaatcacagctggagcagctgggatgcaaggcactaagctcccagactgcacacagcagagggaccctaggcccagcccacaaaaccacttttcttcctaaacctccaggcctgtgattcaaggggctgccacaaaggtctttgacatgccctagagacattttcccccttttcttggtgattaacattcagttcctcattacttatgcaaatttctgcagctggcttgaatttctcctcagaaaatggaattttcttttctattgcattgtaaggctgcaaatttttgaaacttttatgctctgtttcccttttaaaactgaatgccggggctgggcacagtggctcatgcctgtaatcccagcactttgggaggctgaggcgggcggatcacgaggtgaagaaatcgagaccatcctggccaacatggtgaaaccccatctctactaaaaatacaaaaattagctgggtgtggtggcacttgcctgtagtcccagctactcgggaggctgaggcaggataatcgcttgaacctgggaagcagaggttacagtaagccaagatcgtgccactgcattccagcctggcgacagagtgagactttgtctcaaaaaaaaaaaaaaaaaaaaactgaattcctttaatagcacccaaatcacctcttgaatgctttgctgcttagaaatttctccagccagacactctaaatcatctctctcaagttcaaagttcacaaatctctagggcaggggcaaaatgctaccagtctctttgcttaaaacataacaagagtcacctttgccccagtttccaacaagttcctcatttccatctgagaccacctcagcctggactttattgtccgtattgctgtcagcattttgggcaaagccattcaacaagtctctaggaaattccaaactttctcacattttcctatctttttctgagccctccaaactgttccaacccctgcctgttacccagttccaaagttgcttccacattttcgggtatctagagcagcaccccactctactggtaccaatttactgtattattctgttttcatgctgctgataaagacatgcccaagactgggcaatttacagaaaaaggaggtttaatggacttacaatttcacatggctagggaagcctcacaatcatggcagaaggtgaaaggcacgtctcacatggtggcaacacaagagaagagagcttgtgcggggaaactcccctttttaaaacaatcagatctcataagacgtattcactagcacaagaacagcatgggaaagacctgccctgattattcagttacctcccaccagatcccacaacacttgggaattcaaaatgagatttgggtggggacacagtcaaaccatatcagggtgtaaaagagttatatcttcctttgaatttcctgtcattctcttagtttaattccctgaaaaatcatgtatattttaggtggtttgctcccttttcccatggaatccagtggtaaaagcttataatattctgtgtatttagggtagggtttccaatattaagacctaaaaatatatttgtattaagtattttcaagtttctttaatctctattttttattagaaaaaatgtgtctattaaatttcttgtaacctaagggaaacctcatctgtgaagaagtcattatctagaaacttcacttatctgattatttgatatgatgctggaaaaaggaaaagcctcagattaatcaactaaaattacatagggaattcactcagaggctttatatttttatcaaatagttctaataaggtagtcttatgatgtgatttctagattcacatcaaattaggatggaaaggacttactagggacaagcatactactattgagaagttccagtggataactctttaacaaagggcaaaactttaaaaaccacctaagtggaaatgaaagaaagaaggaagaaatgatgaaggcaagtgagacagaggagaggcagtcagaaaggaaggaaagaaaagaatatgatatataattcctgtgcatggttttgcagttttaatagaaatgtgtgtgcccatacacaatatatatatattgtttaaagttgttattatcttttacttgtaaagctatacaagttattcttcctgtaaaaagtcaaatattagactaccttaattctgcctctcttcagagatacaaacatagttacttgcatgttcttttaaaccttttctgtgctttacattatatgtagtttataaaactacaaagcataagttctgtactgtacatactgttcctaacttgcttttttctcttcttccacttaatggtatgtctaggagctttatccatgtcagtatagaaagctctactctaaccctatttttttaacctactgtagaagtaatttatggtttatcatttattttgtcattcccaattgatggattttttttaggttgctttcatgtttctcatctttataaacaatggtgttttgaacccctttgagttcatctttattttttaaggtaagtactagaaaccagaattgctgggtcattggacatgcatatgttgagtgtttctttgtcattgttagcctgcaccctccacattggctttaccatattatactctccatcttgctaatgattattcacctttttttcttcttcttcatagggtttactagcattgggcatcagtaagtctgttcaaacaccagatccttctcatccgtaaggacattgccttattttgtttttgtttgttttggcgataagtcattgaaataactaaatatcagaaatctcctgcaatttatgtacctgcagtttgttcaagatttggtcatttcttccactgtagtatctaaaatgcagaacttcccactgtgtcaaagtaaattcaaggtataatttgaaaatggagttcaagttatttttatgctttgtagcacggcatggagatcttgttttctccatatttgataataataaagcacatattttgatcttagaggtctgttttatttggtccaaggaaacatatattctagatttagactcataggctgcccaatctaaaattttgatgataacttctattagatacacacttattttaatcctcctgttgtgatttggaaatgtattttgttaatatttcagaattatttatttgtaaaatgagtatactttttagaatgtattattttgaatcatagccattatttgatacagagatttttttctattgcttctattaacataaccatctaacacttttgaattccacaaacatcattttaagactagcttcagtaatataatttgataaatcttaagaccaaaaaaagtgcacttttatttctgtaaaggagtctacctctattctttagaaatgcctttctttacttgaaagcaatactactgttttcccataaataacatatttgaatgttttgtaactgtcaagctagtatagagaatagctctctagtgtgttaattacccatcattacagtgttttaccatcttaagaaaaatttttttttcatggccagttttatgtacaaaagatttaaaaacagaaggtacaaattttaaattttaggttgtgaagatttcttctcaaggtatttttatagtctactttagtgctgcccaacagaattttctgcaatgatggaaatattttatatctgtccagtatggtagtagctaactacatgtagctattgagcacttgaaatgtggccagtgcaactgaagaactagattttaaactatatttagttttaatttatttaaatttaaattgccacatgtggctagtggctcatcatattgggcagtttagacctacataatcaaaattttcaataagttaataattccttgaaatcacctgaagtaataccatttattttagatcttaatttactttaacgtgaatatatattcatgttactttagaagaaagtaaatttttctgagtgagctgattgtcacattgtcacatctataaactgggaattccccatggcaggattactctttgcaaaaaggaattccaagagcagcttgattaagaattcttgttgaaagccgggtgcagtggctcatgcctgtaatcccagcactttgggaggctgaggcaggtggatcacctaaggtcgggagttcgagaccagcctgaccaacatggagaaaccccatctctactgacaaaacaaaaaaattagccgggtgtggtggcgcatgcctgtaatcccagctactcgggaagctgaggcaggagagtcgcttgaactcaggaggcggaggttgtggtgagccaagatcacgccattgcactccagcctgttcaacaagagcgaaactccgtttcaaaaaaaaaaaatgtcgggcgcggtggcccacgcctgtaatcccagcactttgggaggccgaggaaggcagatcacctgaggttgagagttcgagaccagcctgaccaacgtggagaagccccgtctctactaaaaatacaaaattagctgggtgtggtggtgcatgcctataatcctagctacttgggaggctgaggcaggagaatcatttgtactcgggaggtggaggttgcagtgagccaagatcctgccattgcactccagcctgagcaacgagcaaaactccgtctcaaaaaaaaaaaaaaagaattcttgtttaaatttgtatttctcagaagagtgccactgagtttgggtttgggactaaattttccaggaaatatttttattaatgagtgattcttttcctcctctagtatgttattaatatatttttgagcacctttaatactaagtattgtgtcagtactaacaataatacaaaataatgtacatattgatgaagcatgcttgaaaaataattgagattttagcaccatgaaaacacccagaaaactgaaggtcttagttctagtaatagttgaaagttgctgtgtgctaacctattcagaaccagcaataaattatgtgttgtaaacttctgtatccagcatcaaattataggtattataaataatagactggctgcacacaaagatgaaaatattcaattagaagctgcattacaaggaaatttaaatgttatcctgttcattaaacatctgaatgcattttttaaaagattaattttaccaggatctgtggtacataatagtaaagtagctctctaaatcaaaataggctatttggaaaagagatcagaaaatacctgaattaaatggtattcactttatgtattttcaaaattcttacagttttttccactttacatattgcttttcaagtttggcacttaacatcttacttaaatataaaattataacatcttgatattgttagtctttttcattgacctattaagcacatatattttaaaagaaaccatttgtatttcttgcgaactatattcttttctatttttcaggtacggattttcaaatatgcgctatatttcttcgctaattagtggtgttggtattttcatgatgggtgcaggactatcttggtaccatggagtcatgggattgcttcatcctcaaccaatagaatcccttctatgggtaatcctctttttttctcctcagttttgatgtcttatgacatagtgattgtgtacagtagaaggcctttgtcatattggtgttaaaggagaatgacatacaccttcttgactgtgtattgtagggttatatatctatagtttaatttttagaacgtgactggacataacctctaaatccataagattcaatgatgttgaacaagatctctgtaggtaccaattatcaagccctgctccttggttaaaatcttgggcagttccactaatttctccagttactgttgaagaacaagaaaacctctgttcacttttggtcccaagaatagtctcatttcagtaattaaaatattcagacccatgtaatagtcataagttggaactatatttgaagttaaagcttctcttttcccgcatcctgggcttccttcaggtaggaagcctgcactgggggaatgggaggatagcaggatgatcacccgtatgatcccctctggggcttctgcccctctctcctattccctggaaagtgttgagggtttggataagggataaaaacataccactttactgactacagtgttattttgcattggtttcctctggcctttgtagatgtttaaaactgtctttttttttctcatgggcacttcttggagattaccctgcttggctgctctggctatggctgcccaaattgatcacatagcctaccctctcagcttctgcatctcatggtgtggtttccagacagtgctgaagttgtcttgcatttggaaagaatgccctttgagcagctgatctccttataaaagactcctagggacctgtgtgttaaaacagacatctttaacacactttctgtgggagtgcaggtttttctctcaagcccaatgatctactctgctgatacagccaatatcagttagtaggcttgcgtatggatgtatcactcaggtatgcatcagacagtttgctgtgatatccaatatcccgggggacacacatcaaggctactgaacaatcttagtagctcaacagctttcaccaaagaaatcttcatttttggcctcctcaatttcagctcttcttatgtggtctagaggatgtggagctagcatgtagtctagtgggtagaggccccaggtttgggctaccttctgtgcaaggcctgaatagatggtataacacctccttttggaatgtggggatacttgtacctattttcttctctattttgagttgtagtcagaactagacagaatcaatctgtctacttttttaatatcctgttatatcatgcaaatctacttaataacaagcacattaaactaggcttatttgttattctctagttttctatagttttgattgactagtttcttaccataatacatttcatataattaaaacaaacaaatgtgtttcctccattctgaaaagatttggccactttatgggtacttcattgttctagcgttcttctaatttgtatagtgtcactttataggggcaaagcactctctgtagttagagattaggtaattagttaaattttcagttgtgtataagttttaaaacttctaaaagctcttgtgtctttcagtaactaaatgggtttccattagactatggccctttttaaaatagtgttggactaggttcaaagttttcagacctctattttaggaaagcctagggttctaaacattgttgaaaattctgtagatgtttggtttgaatttcattaaaataaaaaaaatgtgttgctaggttaactttttttttttgatacacccctgtctaaagctttttttaccatctttaattgaagagtgtcctgggattgcagggaatgtggtattaccaaaaaacaaacattggttactgtttgtaactacttatctttctgaatcaggattttcttggtattaggcatggaagcaaaatccagaagttacttgagtttgggtgtggatcttactgtatctggtgtctaccactcctgatatcaaatattgtattcatatctcattgtcctcctcatttgagttgtttcccattagtaaccttactgtctggcttaaatttgaattcgtgtttttgttttagacattacggactttatatatgaacaattgtgattggaagtacttaatttatgctttattttaatatttcttttctaggcatattgtattttagcaggatcattagtatctgaaggaggtatgtactgtcacaaagtatgtctctattcttaatttagtaatatatattcagctgtccattattatagtttgctaagttctgttgattaaagaaaagcaagtgtgggaataggcatctaagctttctctacttttagggagtaaagtctttgcataatgtactgtggttgttctgtaatggatagctgtgggggggtgtgtaactgcgccctgccatgggatggcatcctggcaaggcctcatttctctttgtgtcctgagctgctaggataggctcaagtaggtgactatcagatagatggaagacagtaactgatgtggcatgaaagcgcttagcaagcccaccatatttgtggttatttttaaactatgtggtggtaagaggtgttccttacagttttcactttgcaagcattattccttgattgaacccaccaccactactatcgctgttacttgccgattcactaaaaattggataaataattattttacttatttaaaagggaaagtatgtttcatttttgagtatcataccataatactcaaaacatttgaaatggagtataaaaaacataattaaactgaacttttaaaattagagtttaataatattcaccagaagaatattatttactggctcttgtgagacaaatatttcaaagtttttgaaatacacagctatagcagtatgatgacagagaactgctaatatcagtataaaactgcctgattcactgctgtgctcatgtttacttctgaaacattgtaactttctatgtataatgttcccttcatctatttttaaaattaacattttttattgacagatcctaattgtatatgtttatggggcccctcatctttgaaagtctatgaaatggttataacacaacctgcttcaaaagattgggaggctcagaaatgaatgtggttagtgtggtgctgccaaatagcagctcttcaataaactaaagctgttgttattagtaattatatttaattattatggtttagaactatggggttcattttattataatgattaattgataacaactaattaacatagaacttgtccttattgccaaccctagttttaaaatgttgtgcttatttgtttatcttttgagatgccatctttaaagtttggaggcatgaagtttctgtcttgctgatatgaatgcttttcttttagcaacacttcttgttgctgtaaatgaacttcgtaggaatgctcgggctaaaggaatgtcattttacaagtatggtatgtattttagaaaccaagtgtttgtttcacctcccttatttgcttaaaattacttagtactgttattgctttgttcctaatagaaatgtacaaaatatatctgaatatcatccctgtgtggctcttacatatccttcagcccttattaaaaagaaatgtagtatagaaatttgaacatggatactttatatttggatttgacttaagtgaactaaggtatttctttatatggttatataacttgagaaagtaatttgactttatgtatcagttattgttgacatttaagccaagaaattatgtttgcattgagcaaggtttttaaaatcataatctctcatacacttttttatcttaacttatatcttgattttaaatggatacttattaaaatgttacctgatagtatcaagttaagattttagaaattttcttgtcttgtctcttccccaatgactagtaatggaaagtcgtgatcctagtacaaatgtgatattattggaggatactgctgcagtcttgggagttataatagcagccacttgcatgggccttacttctataacaggtaaatattccttaaattacaggtgatttatttgtcctacttaaataattctctaatatgtgggaattttctcttatatcattgaataatattaaaccaacaaattgttaaatgttaattcctactaatcattgacttatgtaagacatttggtcagcagaagtattcaggtttatttgaattaaaaatgtctctaaattagaaataaggaaggctatttgtaaaggatttctgtaatgctgtacgtctttctagctgtgacttaaaaaattgtgcaatcactctgaactttttatttacctataaaagtgtggataatatttaccttggtaacctcttaggtttattaagaaaatatgagagttttaataaactctaaagttccaaataaatatacataggtcctcaaataacattgttttgttcaacttgattttgttataacattgttgcgaaaaatatcaattcctaactggagctaccatctctgtggagtttgctcattctccttttatctacataggttttctttgggcaccccaacttcctcccacatcacaatgccgtacatggtcagtgaattggggtgtctaaatagtcccaatctgagtgagtgtgggggtgtgtgtaagtgtgccctgccatgggatggcatcctggccaggtctggttccttcctgtgtcctgaactgctaggataggctcaagtagatgataatcagacaaatgcaggacaataactgatgtatgaaagcgctcagcaagcctacatatttgtggttgtttatttttgaattatgtggtgataggtgttccttacaattttcactttgcaaacatttattctttgatttaactcaccacccctactattgctgatactcactgattcaccaaaaattgggtaaataattattttacatagtttttattaatttttaaaaatgtatatgtagcccacatttatttcagtgttcaatattagacatgttttgggtcttagaagttgagtgatgtttttgtgaccagaaatatgccataggaacttaactctttttttttttttttgagacagagttttgctcttgttgcccaggctggaatgcaatggtgccatgtcggctcactgcaacctccacctcccaggttcaagcaattctcctgcctcagcctcccgagtagctgggattacaggcatgcgccaccacgcccggctagttttgtattttcattagagacggggtttctccatattggtcaggctgatctcaaactcccgacctcgggggtgatcctcccaccttggcctcccaaagtgctgggattacaggcatgagccaccacgcccggccggaacttaactcttgtttgtatcagttagcttatggtaaaattggttttgttatatgttgttccctataaagtcgcagtttctaagaacctattgacaacatgaatgaggacttaaccgtatattgtggctcttgttcatttgtctttttccacacttaatgccaataataactactgttgccttcctatttctttaattctaagttgtttgtgtccttattttggtagctaattaagtgttttgagggccaataaaatacaagtaaatgaaaagacaattctattttatttttattttcgaaaacaaccatttagcatgaaaagactcaatttatgaagttggaattctcttggaaaggaacttcttccatacttctctatttgtccttacatatttaaaataattttaggtgacgagcttccacagttctgcagtgtttcttcaaatagtctgaaatatgaatacttctttctcattctgagtgtgcattttaataccaaactagcattctctgatgtttattgtgatccaaaatatttgtaaaaatgttgattgtttttctggttgaccatatagttttagactgtttttgaacataaattactagcaaaattttaggcttaagaaaagtgtgacttgatgcagatgtcaactttgaataatttattttcttttacataataatagaaaccaatcaaatcaaatttacaaaaatatgtaatgtgttttacatgaattaaatttttcttaattagctaatttattcaaattaaattaaataacatgccaagaaataaaagttttcttaaaaaaggtattttctttcagctaatattcctgtaatttctttaagagtacatgaatgtatatatttaaataaaaataactcttcacatttggatttctaaagagcagtatttgattttgagctctataattacaaaacttctaatggataatgttttacaagcggatcatttttaacacttagtatagattaacaagtttgctttttagtgttacagcttagcaaaatatatgttttatcaagcattaagaagagttaaatatattgatgacatttcatctttgggataaaaagacttgtagtcataaaagccatgtgtaaaatttattataaagatttaaaacgtatttattggtgtctattatataaatattacctatacattcatagatgataaatcagcctttctcattggttctgggagagaagccctgacaacctaaggcaaatattagaatcagaatcacctgaagggcttggggaaacacagaatgctgaaacccacatccagaattttttattcaggggcctgaaatgaggtctgagaatttgcttttctaccaagttttcaagtgatggctgctggtccaggaaccacactttgagaagcaccaccttgaggcacctatggcatgtaatgaattaagttctctcctttttatctagaatgatactagctatatatcatccttggttggatgagaagagagtcacccatattattttctgtagggcttaattctcttacagaacattagtaggaagaagatacggaaaaaggtttctttcagcttttgattccactgttattttgtctatctggtgtaggaaaagtgctatggatatatctaaaagaaatggactcttcattatgtcatttttttgtattggtgtctctaatctaaatgtgctcagaaacttcacatatgtaatgacaggtacaagtaagagatcttaattatgtcacatagtactcttatgaaagcaagttgtagcatcctcattttgtggtatattaaaactattaggagttgttaaaggaagtaattaaagaaattaggaataaatttcaagtgccttgatttactcgttctggttctttgctctctataaagttcactgaaataatataaactgttaatttactgatttttttatgtgcttcatttaggcaatccactgtatgacagcctaggttctttgggtgtgggcaccttattaggcatggtctcagcattcctcatctacactaacacagaagcactcttagggcggtccatccagccagaacaagtacaacggctcactgaactcctggagaatgacccatcagtaaggtcagccttattccagtaatcctgttaaggcttacaaaaacatattaaaaaacagaaatgcctggtttgtaaatacttccagaggaagttttggattcctcgtcttcagaacgttttagtctgtaacttttcagaattataatcctggaagtaagaaagaatacacttaggaaactccttctaagtttccttttaaattttctatacttctaatttttagagtaaggaagagtcaagttgatataatgagaatggaagtttgcaaagtagttgtcttcttagtggaaatacttaatatggaacctgtagagttgccttatattcgcattgcaattacaaattgaatatattaaatttaaaaagatttttgttcattgggcaatgattaccaaattaaatataatttatatttactttgaaaatagactttgttttagcttattttaagtatttttcttataatctttatcttttaaattatgtaaaactaaagaactggagacttaggagataatcagcagaagagatacagaattctaatagtgcttttcagtgaaattctagcagcattgtggttttataatgaaataaaagaacaaacctttaaaaacccagttttctactaactcgctctatattttttcaaactttaaaataagatttttttgtgtattgtacttgaaatctttaagttaaatctttttaaaatgacccgtatatctgaattagtaaaatatattaatgattactagatttatattctatgccctatatgtttaatcttgaaaagtaactatcttattggaacaagattagaaaatgagagatgggcacagtggcacatgcctatagttccagctacttgggaagctgaggcaggaggatcacttgaggccacgagtttgaggctagtgtgcaatgatcatgtctgtgaatagccactcactgtactatattctgggcagcatagcaaaaccctgtctcaaaaaaaaaaaaaaaaagattagaagttgagcattatgaaagtcagtattagagttattaacataatgtgagataatccaaattaatatcctttctttgtgatgtttttgtctggttttggtattaagataatactggcttcagagaatgagttgggaaatgttctctcctatttttttggaagagtttgtgaataattggtgttagcttctttaaatggtagaattcaagtatctggatatgagctttgctgtgtgggtagttttttgattagtaattatatctcttgttatggatctgttcagattgtctgtttcttcttgacttagtttaagtagcttgtattctaggaatttgtcttttacttctaatttacctaatttgttggtatacagctatttataatattcctttgtaatccattttatttctttagtgttggtacaaatgtctcatctttcatttctgtaatttgaatctctccttttcttggtcagtgtagctaaaggtttgttcattttcttgatctttctaaagaaccagcttttggtttaattgactttctctgttgtttttctattttctttttcatgactttctcctttaatctttattatttttttccttctgcgtgctttcagtttagtttgctctttttccactgtcttaaggttaagcttttaatttgatgtttcttcttttttaaaatagacaattacagctacaaattttcctttaagtattgctttctctgcattccacacatttccatatattgtgccattttcattatctaatagtattttctaatttctttttttattcttttcagttatttaggggagtatgtcacttaatttttacgtatttgtgagttgcacagatttctttccattattgatttattattttgttctattgtggtcaaagaatatgttttatattagttctgtccttttaaatttaccaaggtttgttttatggccttacatatagtcttggataatattcatgtgcacttgagaagaatgtatattctgctgttgttgtagagtgttctgtagatgtttgttaggtttaattggtttatagtgacttcaatttccctaattatcttcttgctctattgttctatcctttttttttttttttttttagatggagttttgttcttgttgcccaggctggagtgcagtggcacgatcttggctcactggaacctccgcctcccagattcaagtgattctcctgccttaccctcccaagtagctgggattacaggtgctcaccaccatgaccagctaatttttgtatttttagtagagacgaggtttcaccactggccatgttggccaggctggtctcaaactcctgagagacgaggtttcatcactggccatgttggccaggctggtctcaaactcctgacctcaggtgatccacccgcctcggtctcccaaagtgctaggtgtgagcaccgtgcccggcctctgtatccgttactgaaagtatcgaagtctctagttattgttgttgtattagctcttcctcccttcatttcttcttggttttggcatcatatattttggtgctctgttgttgctacatacatgtttataattttgtatatattgtttaataagtaatgtctaaaaaagagctataaactgaaagactggcaaattcgaaattttgtggaagagtgaatatctgtggattcaattattggaaaaaatacgttagtaatccagaaaattcatacaatttttttaaacagtatattagttacctactgctgtgtgacaaattggcccaaaacttagtggtttaaacaacatattaccatcttacagtttctgtgagtcaggaatcagggcacagcttatctgggtcttcgacttcagggtttctcatagactgtaatcaaggtgttgactgggattatagtcatctcctggggaaggggctgcttctaaccttactcacatgattgttcgcaagatttagctccttgccaaatgggcctcttcaacatggcagcttgcttaatcaaagcgtgcaaattgataaggcaatagagagcgagtgtgaacaagacaaaagtcacaggttagtcacctggtcttggaaatgacatctcatcactttgccatatttggtagttatagcccacattcagtgagaggagatcacacaagggcttgcgtataggtggcagggattgatcatatgggagccctccaaacagttttctgtctgtagttagttatatgtaagaacataaggaaaaagtatatctaaatatatttattagttgctactcacataccagccaaataatgaaatgtgtttatactctgtgaagactaaagtagaaatgatttttgaaaatgaataaatatgttctgtgagttaccaggagagaaaaaaaaaagaataaatgatatagccttttgccaatctgaaaaagttttgttttaacttgagcacatgtaactataaatattaaaacattaattcttatttcatccttgatggttgattaaaatatagcttccttatatggataaaaaattttggactcagtgtttagtaacctgctcaggatccctcagaaattagggtctaatgttgtaagaatacttggagtcttacgtaggcttgtttttctagtaaatctccatgtcctcagaattcagagtgttttgttatttcttatatgtgctgtacagaaaagatcttacagtgatcactgtagaaagaagagaatttctcagcagtttctagggaagattgtttactgagggttagagcaggaggggtgaaaagtagttatgcttgagtatctgctttcctgtctgggaggcaaaagggtatgatgcaaataccactgggcttgcatttctgaagagctgggctggggagtcctaatctgctgtttactagctaaattaccttgagcaagtcacttatgccactctaggatggttttatcatgtataaaataaagatgtcaccctatccacttatgaaagccatccattaaatgcctgccttatagttcttactgtattaaacattttatatatgtattagctcattattcctcacatcaagtcccatgtggcagttattattaacctcattctaatagagaacttcacagcattgtatgaagacttttaaagaagctagtgaacatacaattggttaatatactctacaacaccattataaattaaaacaaatttttatatggcatttaggaaattgataagtagatatatggagacaaaggcttatgagataacatgacattttagaaaattgatttagagttaatgaatatatatatatatatatatatatatatatatatatatattttttttttttttttttttttttttttttttgagacagagtcttactctgttgcccaggctggagtgcagtggcacaatctgggttcactgcaacctctgcctcccaggttcaagcaattctcctgtctcagcctcctgagtagctgggattacaggcatgcaccaccatgcctggctaatttttgtagttttagtagagacagggtttcaccatattggccaggctggtctcaaactcctgacctcaggtgatcctccctgctcggcctccgaaagtgttgggattacaggcatgagccactgcgcccagcagagttaatgaacttttaatacatgagctttataattcataaattaccataaaataatatttgttaagtttgcacctttgtatgatatcatgccaaaaaaaaagctaaacggacaggccttggaaaatgataggtggtacttaatggtgaatactctgaagccatcttagtccattctcgtaactagtggggaaaaaaacaataattcaagcctttgtgctattaaagtatatatatgtgtatgtatgtataaataaatttgtatgcattgttattgattgcagggcaattcatgatgttaaagccacagatctgggattaggtaaagtaagatttaaggcagaagtagattttgatgggcgagttgttacaagatcatatttggaaaaacaagattttgaccaaatgttacaagtaagtttatttgttgttttcttacataactgagggttagaaaaatgcttttaaggtaaacaaaatgaaatttttttttatagatcttaaaggcactttagctctcaacttcttaggttccaaaatttaacagagacctttatatttactatggaggggttcagaggagacagcaaaagaacaaacttactatttcatgcttgctatgtgcatttaatctttttttatctaatttaccctcaacaaccctgttatttcaacaatgaaataacatttttattttaacatatatagaaattgaaagacagagattaagtaatttgccttaagttgtagtgccacagagatggagtcatatatgaatcgagatctgcctgactccagaatccatttttttattaagaatagtttaaaagagaatttataaaacagaatataatgaacagcacagatgttaccacttgcccctgtcaaatcttaacattttgctatagtgtatttgcttaaggtcttaaaaaaagaaataattacaaaaacaattcaagcccccattttctctttctatatctcattcttcttcttccatccctagaattaaacattatgctgaatttggtacctgtcttttccattcagatttttatacttttcagcattttttagtgtaatatgtaacattttgaatgtttaaaaattggtataaatggtatcctactgtatgcgtctctacaattggcataacaacatattttttagattcttccgtgttaatttatatatctctagtcagtttaccttcattgttatagagcatttcatcctatgaatatgctgtaatttatttattttgtctccagttgatggacatttatattactgttagaaacaatgccatggccgggcgcggtggctcacgtctgtaatcccagcactttgggaggccgaggtgggcggatcacgaggtcaagagatcgatcccatcctggcccacatggtgaaaacccgtatctactaaaaatacaaaaattagctgggtgtggtggtgcgtgcctgtagtcccagctactcggcaggctgaggcagtagaatcgcttgaacctgggagttggaggttgcagtgagcctagatcgtgccactgcactccagcctgggcgacagagcgagactccgtctcaaaaaaaaaaaaaaaagaaagaaacaatgccatgattgcattctcacacgtttccttgttcacatatatgaaaatttctttagtatggtgtatatatagatagctagattttaaataggtgggccattgggtgtacttaccttcagcttgcctaggtcttaccaagttattttccaaagtgtgtcaatttaacttccatcattgtatatcaaggttcttgcttcctattcttacatgattgtattaatagagttattaaatttttgccagtttgataggtgtgaaatagtatcttgttctaattttatttcttggagcattgaggttaataaacattgaagttcattgaccagtgggatttcctctacattgctccctgatttttcatgttttaagttcatttgcattacacttatagatttgaaaggtctttattttattgcattgtattattattttttgagacagagtctcgctctgtcacccaggctggagtgcagtggcgcgatcttggctcactgcaacctccgccccccaggttcaagcaattatctacctcagcctcccaagtagctaggattacaggtgcctgtgaccacacccggttaatttttctatttttagtagagatggggtttcaccatcttggccaggctggtcttgaactcctggaaaggtctttatttttaatatcctggatgctaattcttacttgtatatatgcaattatttttttctagtttataacttccttttctttttgttgttatacaaaatatttaatatgatttttaattttaatgtgagatttgtaatcttttcctctgtgctttttattcttttgcatgaaaaatccttccatatcccattatcataaaaatattctcttctcatctagtagttttgtggtttgttttttacccttatgtctttcatccactttgaattattttaatggtctgacatagggattcaatttttttttcttaagggaaaatattctaacactatttattgactatattatttccccagtaattttgtagtgctacctctgtgtagtattatactcagttttcttgatccgaattgttttggaaataggtaatccattgcctgtggcttaaagttttaaaaatgttcattaaacttaatggcgtttgttataggtttgtttttttttaaggagtcataagtgtaccactatggttttttaaaaatttattttcctgttttcattttctttataggaaattcaagaagtgaaaactcctgaagaactagagacctttatgcttaaacatggagaaaatattattgatactttaggagctgaagtagatagacttgagaaggaactgaaagtaagatgtattcataaaaataacataatgataatggcagctatttttttgagtacttactctacagcagacactaagtgcatccatcacatgcatgctttaacccactcataactccacagtgtgtaggtatttataagcaagaaaatgactgggttagataagttgaataatttacccaaggaaatagggaaattgtgatttgaaccagattctttacttttaaacactattttatgcagcctgcttagtttctaaaatagtcaaagggggtttttttgtttgttaataaataagcattttgaaagttcctagagaaagatgaaaaggaaactttagactgtggtcaaaagttagaaaaaatagaatgtatatcttgcttttagcccatttgaaattattttctgtttttgtttgtttctattcagttggatgttattgtaatttattgattatgttactgaaatattacctgatcctgatcaggttgtcttttaaaatgtctcagtgttctcaaattgccatttattgacatttgaattctgtttgcaatgaataaaaacttgtaaatgatctttaatgtatataatttgttgaaggcagtgctttttctgcagttgatattgaccattctttaattttgtaaaaaattgaagaaaaaaacttccatctctacttttcaagttttcctttgagaatctggatatccgattagattaatacaagtacttcaaataagattttgttaatattatagttcatgagctttatctgacataatttttgaattttctagatgatattttggtcttaagacgctttcattcttaaaaattattgcagacctcaaagagattttatttatttgagttatagttattgatatttaccaaatcatgcatgaaagtagataaattttaaaatatttatcatttacttttaaaaacatacacctatttaatataaataactttttttttttttttaactaagaatctcactctgttgcctaggctggagtgcagtggcacgatctgggctcactgtaacctccgtctcctgggttcaagcagttctcctgcctctgcctcctgagtagctgggactacaggtgcctgccaccatgcccagctaatttttgtatttttagcagagatgaggtttcaccatgttggccaggctggtctcgaactcctgacctcaagtgatctgcctgccttggcctcccaaagtgctgtgaagtgctgggattacaggagtgagccaccccacccagtcacatttttttttttttttaactgagacggagtctcgcactgtcacccgtgctggagtgcagtggcacgatctcagctcaccgcagcctccgccttccaggttcaagggattctcctgcctcagcctcccaagtagctgggataacaggcacccaccaccacgcctggctaatttttgttttgttttgtacttttagtagagacagggtttcactatgttggccaggctggtcttgaactcctgaccttgtgatgtgcccacctcagcctcccaaagtgctgggattacaagcgtgagccaccatgccaagcccacatttttatataaatagttatattttccaaaatgaaaaaacgtagttagaagagtgatatttcacatttttgcaaaagtctcttatgcctggcttagtagaagacagctacattcccatatctgcttctgccttcagttgtagtgatttgattgtttggccgaagaacatgaaggaaagggagaactgttcctatagccttttgagataattgtgatactctcttttggtgttataacagctggtagaaaccaaatcaatgaatgaacttctcatatgctacttgtgaaggtagggggcacagtctacaagactgtccttccttctaataccaactgtgagttcaggaggttccctagagcaccttcagatttaataactcactaggactcttagaactcaccgaatcatgttatacccatcatggtttggtttattacagggaaaggatactgcttgaaatcagccaagggcagaagaagtgcatagggcagggtccaggaaagttccaaacatgaagtttcagttgtcttttctctgtaatgcatagtattactctcctggcaatgaagtgtgacagtagcatgacgtgttgccaaccgggaagctcatctgagacttgatgaccagagattttattgaggctccatagttgactgcataagtagctgaccttttgtctctagcccttctagaggtagagcagatactgtgtggccaaaggcccccatcatatatcacattctaaagttaatgcccccagataaacaaagacactcttaggcaggacatgtcaagggcctagaaattccctcccggttatggagaacaaaagccaaacctccctttgggtaagattaattctctactatacactgttatattaaaatctgttggtctatttttatactctgaatgaatcttttacccatgcatgattctataacattatgaattagtattttggaaaatactggttcacagaagtacttagatctttcagatgttgatacatttctaaatatgggtacactctcaggctgatggggtggatatgtttttcaacttaaatttccacttaaaagcttgcattttatcattagcaacaaatactgttgttttccttgaaataagactcattttgttcattttttaggagatgcctgccaaatacccaaatttgaataaaccgagtttgttaatctttcaaataaaaatgtactctagattaaaaagcagtttattcagctcacaacttaagcaatcaaagaagtacttttacgtactttccattttgtcacagtatttttaaaagtgaactcaagggtttaggtttaataaaatggatatatttgctatttcatgaaagacttttttaaatgaaactggctttttttttaatgtcaagtgtgggacagtagagacaatgactactggtattgtttgatgccatttgtgttgaattgtgcaaaggtgcaagcagttttacccaccattgtttttatgccatcaggaaatgtcagcatagtaaaaaaagcaaagaatgtcttacagttactgtgaaaatagttgtgaccttagagtccccctaaaaaggtctcaggaccccagcagtccttgaaccgcactttgcaaacaactaatctgtataaaatgtgagacaatggttatttttgtgcaaggtagcacaagattgaataaactttgctctttattctacttgtttttattttgctggcaaggaaaataatggactaaatatttgctttacattttagtagatacaagaaatcagaagccagatttaagaataatcaccaaattggtccttgtcacctacatttactcttacaacaatcagaccttattgtttttgtttagctaactttgtactttaactagaggctattaaatcattaataatgtttttgaattatgtaagtctttcaaaccaggaaggtaagtataatccatacattcaggtggaaacgtctttggctaagataataaagcatggccgggcgcgtgcggttgctcatgcctgtaatcccagcactttgggaggccgaggcgggtggatcacgaggtcaggagatcgagaccatcctggctaaaatgacgaaaccccgtctctactaaaaatacaaaatattagccgggcgtggtggcaggcacctgtagtctcagctactccggaggctgaggcaggagaatggcatgaacccaggaggcagagcttgcagtgagccgagttcgagccactgcactccagcctgggtgacaaaccgagactccgtctcaaaaaaaaaaaaaataaataaataaaataaaataaagataataaagcataattaatcttaagtcaaaggacatgttcatagttgaggtgccaaaccaaaagggaatgcatgaatgtaattgtttttcttagtcatgaaaataaggtgatttccttttgaaaactaaaactttgttcactggcatattccttcatttttagtatctcagtttaaattgtaattattattggattattttgggaggtcacactcatttatataattctgtaccagtggagtcatctctgttgagtaatgccattgagtgttgaaatagattatatttttggcttaaaattccagaacttgtggctgggcgcagtggctcacgcctgtcatcccagcactttgggaggccaaggcgggtggatcacctgaggtcaggagttcaagaccagcctgaccaatatggtgaaaccccatctctactaaaaatagaaaaattagcttggtatggtggcgggcccttctagtcccagctacttaggagtctgagacaggagaattgcttgaacctgggaggtggaggttgcagtgagccgagattgtgccactgcacttcagcctgggtgacagagcaagactccatctcaaaaaaaaaaaaaaaaattctagaacttttgtatagttatctgtaaaggtgttaaaaataatagagactaattcatagattcccatattacaagataggaactacaaaattaatataaaatatatcttgttattattttgaagttctttgacctgttaaacattttttgtcttatctctgtatttcagagtatagataaacctttctcctatccctccattaagttttttgtttatgatgattaatggaaattagttcattgggaggctgctgtagcattcataaattccttataaataatggctgaattaaatgctctgttctttactttgcctttgtttctccagtttctcttaaagcattgtttttaatgaatctgcagcattgtaaaataaattatgtaatttgggctttaactctctgcaagtattggaataaaatcctcatggtgtgtaaaatagcctaatcggtattgagcaatgcaaggaatatagattttaaagtatttgttgaataagtgggtgaaaattttaaattggataccaattattgattttcagttctgttcaataaatattagtttctactatacacatgatatcttgttaagcagtaaacattgaattttaaggatattaatcatatttattcattcagcatatattgtgtgctttgtattgtgcacatatacttttacaaatttgattagtttactctgaaaacttgattttaaaaagcagagcaaatttttaggcttttttttaagataaagcttttattagtacacatttatttatatcatgctttttagacagaataatgtcaaacttaatgaacaggtaaatttttcaagtcatattaggataggtaagggttgattggagtaggaagatacaatttagtttcatttctgtttggagaatttttttttaattctatattgagtttaaggagttctagagacagggaatagttttaaataaggaaaaagttgggaacaaaagtgtgccctccttgttaaaaggtccctggtcattcccacattaggatctaagaggaaagtacccccaggcacacctgagcgacactagttataagaaaaatccctgtgtgcactcagtagagtgttcttgctggagcaaaactccaatattctgccagattttgtttttataactggatgcctttaatacaagtaatatgcacatggtcctaggatatttttaagctaggaatcctaactgaatcatttacaggaacttttctcccctttttatttttgcaatttttatcaataatgcacaaagtttataaagtcaaatagaactgaaaagattataacagaaataactatcactgcctcacctgcctcagtacttatattttaagagataaccatttttaatacttttagtatgtctttatttattgccatatttctgcataaaagtcttatactacttctcttgatttaacagtatttcctctacgataggtgtagatttagttcttttatacactactttctgtcctcccttctcacagtattaatatgttacattttattatatttgtaattccccttaagttgatttaggtgcccttcctttattttattttattttttatttttttatttttttgagatggagtcccgctctgtcgccaggctggagtgcagtggcacaatcccggctcactgcaacctctgcctcccgggttcaagcgattctcctgcctcagcctcccgagtagctaggattacaggcatgcgccactatgcccagctaatttttgtactttttaatagagatggggtttcatcatgttggccaggatggtcttgatctcttgaccttgtgatccgcccgcctcggcctcccagagtgctgggattacaggcgtgagccaccgcgcccggccaggtgcccttcctttgtgcactcacaggaaaaagaaacccaaaatctttactttgctctgtggtagccgagtgttgtaattgcctacttaatttacctatatcacctcactaccaaacgtaagtccactgaaggcaaatactgtttgttcccagctcattgtcatatacacttcaatgcctggcacagagtaggcatgtaatagtagacagtattggttgttattgaattgaagttccttaagctagcatataagatttttaacaacctgatttctgcctgtctttccagcctcattaccaaccctaccctttttgcagcttctgtgctagctataccatagtgccagtgcacactttgcaggctgtctgactttgctgatgttgtgttttctgtctagacactcttcattatctacctggaaggctcatcatatgcagacctaccttagatattatatcctcagtgaaattttctagatctcatgagcaaaatggctgtctcatttttgctcccagtgttattatttagtacagtgtaataggagcttgggatctggaatcaggcctggagtcaggcctggaatcaatcctggctccatcacttactagcagtgtgacttcagacaggttagttaatttcttcgtacttcagttttccctgatgtatgtataagatggaaatagtaattaggttatgaggcttttaaaacacacatacatgtgctcatgtaacacagtacttgatacatgagtgagtaagcaataaatgttaactttttattattagctctaatactttaacttgtagatgattactgctatgctggtctccctagctaaactgagtcactcagggtcaggaacagagtcttatttaataatcatagctctgttttctagcacagggcccggcccaagaatatatggattgttgctaaagtatataaaatgagtggttgtcaatttactctttttgattattattgttttgcagtgattttgttttcaccacacaaaaatgtgtatttccagtgcttcgcaatgcttggcatgtactagatccttaatgcacttttgtattaacaaacacatgaacaaacttaggaatgtgatactacttattgtactgtttatagtatgtctatttacctattgatcttactttttttcttatgcaactatttctctcattagtatgctatagtgaaatagtttgcaaatgttttcattggctctaatgaccaaaaggaataaaaagaaacaagattttattttgctacaaataatgtggtggtgatttttctttccagaaacgaaatcctgaagttcgacatgtagatttggagatactgtgagtttgatggaatgaatcacctgggtggggaccttggaaacaagtttgtccgtccactctacaaagtttcctcctctcctacactgaaagactcagtgccatgcagaagccttttttttaagatgaaggaaatattttatgtaaagagcaactcagcaggacacagaactaaaactactacttacatctaacagacacactacaagttgaatcaatttgaaaatcatgtttttatgcttccatagggaacattttggttatttaaattgttcataatgtcccatatttcacctgttcagtgtatactgtactttgcaatcatctttccttttttcacattggtaaaaataagtggcatccataggatcatgatttttaatttgttgcctctgaagatttcactccatcaagatctgccaatcttcaatattctggctaaatcttggtatgtggtttttaaacagtcactccgtttcaaagtctgtctttccttatagaatgtggaaattatttctccataccttgtgattttgacctgagtgctaagagaatcactctccttacctagttatctacaaatgttcattccagaaatgtttagttactgaattgaatgaagacatctcagtacactcttttaggtcatagtagttgccattttgtaaaatttcttttttcttctttgcttttttccccttatttggtttaatttttctaatgttaggagatatagtcctagatatttccatgggccagtgtgatgacttttttttaaatgaggttcagtaccataatgtttatttactggaagataatgcatttataagcattttaaaattctgtaaagtgggttagaaatatttataattttacaggcaggacagcatttgacttttatttaaaaggcggcactacttatgtaaatctgagctgtgggatatttcttgctttaagagagagacagaatctctcactgaaactcatggtcatgattttgtataatatagttcatactgtgtctgtgagtttcttcagttacaaatgggcatttagtatagttatattgactataacatgtaagtaaatagctttctactgaccctaagttatcaaggtggaaaaaaaacatgcaattcagtaattgaaaatgtggtgaaaagctgcagctgtcatcatcaaaacaactcataacatactttaaaatgttcaggtagcagtgagcattgttcatatgagaatggcggctgggtgatctctttgctgaattaatgagttcttaacatgtggacccaactgcctgtgtgagatctgtgtcttaaaacttactggaatggaaatctatgaattattgcaaattgtaatgctggaaacaaaaaataaatccttggttaaagggtttgtaatggtgatttttgacccagaaatctcatttactggaaaattgtgagactttacgttggtgtatttttcttttttttttttttactattacagagtattttgcatgctgtacattttaagtgaaataacattccagttttatttttaagatagaaaattgttatatatatatataatttgatactctattcttacagtttcaaattccttatcccttctttacaaaaaaaactttttttttacctgttatgatttattctatacttttttcttcttccttcccctttcccacttgccatttattacttcatgtcattgccatatgagaaagtaccaaattatatccagtttcctcctagtgatattactctgaaaaatttcacaaagccagacaagaataattactcattttttttcccaagacgaccctcaaagttaatgtgcagcaggtattccaaatggtaattttttttttttaggattccctaataaaaaaaaaaaaaattctgatatttctttttaaatctgattttggttgaggtcataccattcttaaataataattgaaggtttatgttgccatcttttctaattctgttttgcactgataaacttacataaagtttgtttatgtaaaataagacataaaggagtacaacatatcaaggaatttgagtatttatgtggaatcaggaaatttttctagagtcactgaattttcaaatcagagaatttgggctggatatggtggcttatgcctgtaatcccagcactttgggaggccgaggcaggaggattgcttgagctcaggaggtcaagaccagcctgggcaacacagcgagacctcatctctactaaaaaaagttagccgggtgtggtggtgctcacctgtgttagtccattctcacactgctataaagaaatacctgagactgagtaatcaaaaaaagagctttaattggctcatggttctgcagactgaacaggaaacatagcagcttctgcttctggggaggcctcgggaaacttcattcatggcagaatacgaaggggaagcagtcatagccagaggaagagcaagaggcggggattgggggtaggtgccacactcttgtaaacaaccagatctcatgagaactcactatacagtaccaagaggggaaggtgctaaagtattcatgagaactccacccccgtgatccagtcatctcccaccaggccctacctccaacatgggattacaattcgacatgagatttggtggggacaaagatccaaagcatatcagcatctgtagtcacagctacttgggaggccgaggtgggaggatcacttgagccccagaggtcgaggctgcaatgagctatgatcatgccactccagcctgaatgacagagtgagatcctgtctcaaaaagagaatttgggtctctttctccaaaaataaggctatatttagtttttcaggtttcttgttattttaccaaattaatgtttcttactttgtatctactttggcatatagcatttgagtattaaagcatataaatcatttttaaggaaaatattctctgcaggagaataattacaaaaataatactggacagaggaggggcagtcaagggtccatgattgattccttcttgcccaaaactaaaatctaggatttatcaaaggtgaggtatacagtggtccctgacttataatggttgcacttaagaatttttatgatgggtttattggcacataacccaataataagtaaaaagcatctgtacctacttttagctttggctgagaatggatctctaattcactgtaagtagcagtccccaaactatataaggtggcacagttttcatcatggcagtgggaggatgaggggtggagtgtttttgttttttttgtttttttttgagacagagtttcgttcttgttgcccaggctggagtgcactggcacaattgcagctcaccgcaaccttcacctcccgattcaagtgattctcctgcctcctgagtagctgggattacaggcatgcgccaccacacccggctaattttgtatttctggtttagacaaggtttctccatgttggtcaggctggtcttgaactgccgacctcaggtgatccgccctcctcggcttcccaaagtgctgggattacaggtgtgagccactgctccggtgatctgtttttaagtggagtatcctgggggcctatagtatccaactccaaagaggtaagttcctgaacatacactaaagaacctgtgagataagatcagacggaaaaattttcaaattttttcaaaagcaaaggtaatccctgcatacatcctcctacacacacacacatagtgcaaagtgaataacaaaatgtcataaggcttgagtttttggtatatggctttcagtgttaccttatctcataatttaggtaatgatttttgctaaaatgataaccatctaaagagtgcctaagttttaagtctcgtaactttttgaggaagaatgctgggaactacagaaaactgcataggcatttagaatttgtattatcttcttagactgcatttgtcaagctttggcagcatttcttttaaatgtgatgaaccccaatttgccaaactgtcagaagtcagtgaagcaaagaatcgaaggtaaaatgttgattcaaagattgtctcccctaaatccttcatttctttctctgaaatggaactttggaagccatttatatagattagtctgacagcctttatatttgcatgtaagtttacttgcatccttagacttggctttatgcaaaaagaaaatttttattcgttatattgtatttcatctgtctgatttccctggcacattaagatggtcctggtccctcaggatactttttcccttaataaatgtcatatgtaaataaaggcaactca

SEQ ID NO: 5 - DNA, 14705 bp, Homo sapiens
gatgctcaggccaccgttcccggcgcgcagtcgcagctgaccctcgctcccgcccccgcctggagtccgacgtggaagttgctggctgactgggcttgcgaggaaaccgcctcggagctgcagccgaaggccaaggaatcactgaagatcggcgagggaggacagggggttcatcatgggtgaggggttcgagaagggcacctgggcgcgctcgagggagccgcggccgagggctggggtgcagaggaggagaggggccggccaggataccctagagtagccagctcctcagggggcgggtcgcggaggacttgactcactttggatcttcatctgtaggggtggatccggcctctcgcgttctcctccgtcctctctcggttccccttgattcctgcggggtccagggacccggacagcttggggacgtccgcagagcctgggttcgagttctttacccttatcatgaagttttccctcatccccagctccacttgctgggcagagttgttcttgcggaggctggcaacgcgtcagtcgcaggttcgccgaggtttcttggtgaaagatgagctgcggccccagagtggaagcttaatcattctctttaccaggggcgctgggacggcgtcagtttgaaaaacctgagagcaggtgttgcttatgttgttttatggccagtttggcatttgtctgctaatctgctgtagcgtttcatgtaataatacgggtatttctagtcggcaaatgaaactttattcttggttcttggcccgctgattgagggaactgcattctcacaagcatcaggtaacaccctcgccccgctagaacccaagtgagggtgcacattctttaactcgtttctcaccctccaaatgaaggtgcagattctttggcttggttaaatccctccacagttttctggggagcatacttcttgctcccaagcatcacaggcgctgtcctgtcttccataaccgccttcagttttgttccgcctctcttctacctgtaaatggtagaaaggactttgtcaagtcacacctattctgttgaactttcccaaggttctctagcccatggtgttgttcatttttcaactcgcagctcttagttatgccatgtctttgccaaataacagtgtggcatcacttctgatgttaactatttttttttgtattaatgtaacttgtttttaatcttctctaatggctctggatgggaaaaggactgtgctttttatcctacacaatacttggtgtacaggaagctttctgggaatattttgtgatgcattggatagagctttattatttttaaaagtgggttttttgtcaaaaatagttattgttttcagcttttttctcaatttcttgtactagctatattgcttcgtggagaactctgattgaagttggttatagtggtactgctgctgtacagtacttttcctgtgcgaggattacattgtcccactatcctccttactggccccttggtttttaggggtagtgaggggatcatgctaaaatattcctattctgctgattagaaaatgagattcccaaaggccgcggccatatttctcttattatttggtttatcttctgtgcctgcatgacacaatagtaacataactaaggacatagtaacataactaattacttgtttgatattgaataatatatttcattgggaggaaaaatatgcacctacgcatccaggaaattataatatttaatttggtatttagctctcaaaggacaaggttagatgttttgtatacctagttcacaaaatgacattgtgtatgttttttcttttattattttttaggtggctttttctcaagtatattttccagtctgtttggaactcgggaaatgagaattttaattttgggattagatggagcaggaaaaaccacaattttgtacagattacaagtgggagaagttgttactactatacctagtaagtgttggtatgatgagctaattgtagggactttctggtctccatccaacataactatttctttctttcttttttgtttgttttagtagagatcaggtatcatcactatgttgtccaagctggtcttagactcttggcctcaagtgatcctcctgccttggcctcccaaagtgctgggattacaggcatgagccactatgccaggcctatttctgaataaattaattcatataataaagtatttgataaagtttgtaaactgctagtatgaacataacattgataacactttttccatcaactaagaggcagcttagtgtaatttaaggacccttgttctggtttacggccgggttgggctgtttataggtttaagttactaaatcttactgagagccagtatctttactaataaaatacataagataacaaatacccactggttttcagggggaaataaacaaagtaggtaaaagtaccttttaaatctgtgtaaagaattatataaatgttaagtgatgttacatgtgaagtgcctttttttcctgtatttgttactattttaattaagattagtttatcttaggtaattatattgattacttttaaagatctgagttgcagagactgagtgttgaagtaatttggtaccttaaaaatatcaagagaaggccgggcacaggagctcacgcctgtaatggcagcactttgggaggccaaggcgggtggatcacctgaggtcgggagttggagaccagcccaaccaacatggagaaaccccatctctactaaaaatacaaaattagccaggcgtggtggtgcatgcctgtaatcccaactactcggaaggctgaggcaggagaatcgcttgaacctgggaggcagaggttgtggcaggccaagattgcaccattgcactccagcctgggcaacaagagcaaaactaggtctcaaaatatatatgtgtatatgtatatatttattaagagaagaaatacctcaattttaatcaattattactgtcttacaaaaatattctccaacagtcttactgactatatgagaatactgttgttatttatacttttttcatttgttgccttgaatttacttagagaagagtagtacatttaaattaaagagttcatacagtttgctcaagattttttaaattatgcctctaatgttagtctgtcactcagggtatttctatattgttactgtttaaatttatggactaaaacgaaagaggctagcctctaagaaagaagagcgttttgaaccctgtaatgtctgttattcctttttgctaccttcagtaaattttagtgcccttagtttttgcttctcaaaatcacccatctctgtctgggcatctcctgcagtgcacagagcagcacagtggatagtttggagtttcagtgagtgctgctttacaccacactctttgttgagacagtgtcttgcttttttgcccaggctggagtgcagtggcacattcatagctcactgcagcgtctacctctacctctacctcctgggctcaagcgatcttcccacctcagcctcccaaagtgttgggattacaggcatgagccactgcacccagtctacaccattctcttgtcttgcacatataaacgatgttttttactgttggtgaacattgtgattacactcctacctaattctaagggagacatcatgaacttgcattttagttttttgctcaaatttgtcatagtattgttattttttaattgtaatagacatacttgccaaatactcaaaggtatcacttaccactgcagacttaaatataaaacaaaagctaattgtccagttatacctggaagttattttttatttatttatttttttgagacagagtctcactctattgcccaggctgaagtgcagtggcaagatctcggctcactgcaacctgtgcctcccaggttcaagcgattctcatgcatcagcctccagagtggctgggattacaggcatgtgccaccacacccggctaatttttgtatttttagaagagatggggtttcacagtgttggctaggctggtctcgaactcctgacctcaggtgatccacccgccttggcctcccaaagtgctgggattacaggtgtgagccaccgcacccagccatggaagttattttttacctatttttcacctaagaaggatggcagagaaaagggatgggacacctgccctttgaccacccagccatgaccttattacaagtgagttctggaggatgtctgcagatgggctgtgagattgaaagctgcagccatggctgtgtccatgctgtagtttagaactgaagtttagctttttttcttttggtctgtttatttgctgccagccaaaattctgctttttatagtacatccacaactgtactttctaaatacagctttcgaacacttttaactactctattatgaggggagtttaatataataggatttccattgagctaaaaattatgttttcctttttatttcttttttaaattctttttttaatttatttgagctaaaattatatactttatttgcagaactgctggcttttaaaaaatatcctgaagatggtattgatcttgctaattgatgttttgtgcacacacctgcacatgtgtgggggagcagagcatactatttcgtcttaaatggtataaaatctcaaccaataatgtgattcaacaattaccatttctttttaactcgaatcctaagacaaattatatatatatatattttaaactctaataacagttaccattaattgctgtaactcaattagataggatattttgaaggtggaatgtattagtctacacataccactgatttgatttctcttccagccattggatttaatgtagagacggtgacgtacaaaaaccttaaattccaagtctgggatttaggaggacagacaagtatcaggtatggtacaaagaccaggttatttggtagtatttgacatttattgattcttttaagggttaaaatcagtaaacccgaatatgtgttctattgtaatttaaatggagccacctagtttaaaatgaggtaaaattgggaactatttccttagagcatccattgagttaaaacttaaggaagcccagttttccagatacctgtttaatgaaaatcttttcacgaaaatctcaagaccttattacttcagctattctcaattagaaaggaccctccatttagttcttgtcagtctctcctctctgaaacacattgttttggaattcattaaagtaccttgcaggcataccatttagggctaatataaaaataaatgccattggccgggcatggtagctcacgcctgtaatcccagcactttgggaggccgaggtgggcggatcatcaggtcaggagttggagaccagcctgaccaacatggtgaaacctcgtctctactaaaaatacaaaaattagctgggcatggtggtgcgtgcctataattccagctacctgggaggctgaggcaggagaattgcttgtaccaggacttgggagctggaggttgcagtgagctgagatcgcgcaactgcactccagcctgggctacagagcaagactctgtctcaaaaaaaataaatgaataaataaaaaataaatgccttctgaagttcaggtcttctgcttagcattttgggcttgacatggcaacagtgaatgtttgatgaccgtcagtagttggtcacgatagtaccatcttaaaagattagtaatgcattctccaaacattctgacttcttttaactcatttcttgaatcacgtttctttttttttaaattgtgcagcctcccaagccagagtaggctcagagagactccattgaatcacttttgagtttatttataattttagccatttctactgcttgatgtcagtgattaatttcatgactgttaaataaaatcacgtttaaaaagtttattcctcttaaggggtgcctagttaaagatttgtttaagaagatgtaatgatcaggtctgtgtacaacttttctatcagtatatttagtgatttcatagattataaataaattttgtcagcctgaagtctgaatgaattcatttggaaactccctggtcctgtgagtcaatgtttatcaacattcttttttttttttttttttttttttttgagacagagtttcactcttgttgcccaggctggagtgcaatggcaccatctcagctcactggaacctctgccttcctggttgaagtgattttcctgcctcagcctcccgagtagctgggattacaggcacctgccaccatgtccagctaattttgtatttttagtagagatggggtttctccatgttggtcaggctggtctcgaactcccgacctcagttgatctgccctcctcagcctcctaaaatgctgggattacagatgtgagccaccgtgcccagccaatgtttatcaacattcttttgactccatcacatctgagggatatggtacatatatccaccagaaacagtgaatcattaaggcattgattctaacatgtgtgggacagaattggcaattgatatgtcagtttcttccttaaaacaataacaatatgttctccccttttaaattttctctaggccatactggagatgttactattcaaacacagatgcagtcatttatgtagtagacagttgtgaccgagaccgaattggcatttccaaatcagagttagttgccatgttggaggtaagaaaacgtaaccactttaaaatgtggggcagtcatttacatattattacattgaagaataattaaaaagaatgcaggggttgttccctccatccttttaaaattattttcttttatggaaatgattttctattccaaaaatacagttgaggagggttggagacaaaacaacaacaaaaattaacctcgtaacttcctcttcaagccagattgcttgattttccaggaggttcagaagagctcacttaaacaaaagcatctattctaagtcacttctttgatgtgacttttaaaatatgtctttttatttttagctgttttagaaggattcaagttcagagaaatatgtatttctgggttactggcacaatgctggcctcacgtttatcgttttttatccttcccagtgtttacagtgcttttgaccttctttctgttctttggacacgagcttgcacacctggctcagggccttttgcacttgctgatccgtctgcttggaatactattctccagcatctttgcatggctgccttcctgacgtgtttcttcccacatctcttccccagaaagaagtcttatttattctctaatcctttacccttctttattctttataccgatattgtttcttttttttctttttctttttcttttttttttctttttttttgtagagacggggtctacctatggtgcccaggctggtcccaaactcctgtcctcaagtgatcctcctgcctcggcctcctagtgttgggattacaggtgtgagccattgcaccccacttactgtttttttacattatttttaaatgtatttgttggctgggcgtggtggctcacgcctgtaatcccagcactttgggaggccgaggcgggcaggtcaccagagatcatcaggagtttgagaccagcctgtccaacatggtgaaacctcatctctactgaaaatacaagaaaattaaccgggcatggtggtgtgtgcctgtagtcccagctacttgggaggctaaggcaggagagtcacttgaacccaggaggcagaggttgcagtgagccgagatcgtgcccctgcactacagcctgggtgacaagagtgagactctgtctcaaaaaataaaaattaaaaaaaaatatatttgtttacttatgtatctctccctctaaaatgtaagttctttgagtttaccctgataggaggaacaatgtatagtacttaattaagaattcaatacatcttattcactgaagttaataagatcatatattggctaactgatcaaattcagaggatgcattaaataatccatttttaaaaaatgaaaaaataatcaaatgtactatgataataataaaattgcccttgctctggaaaattagatggataagtttctttctcttgtcaaaaactggattctgaattgtttaatcaagggatgtttaaatataagttctaggccagttgatacctaggtaaaagcatcctcagacgaggggactatgtacttttgaattcttttttttttttttttttttttttttttttagacagagtcttgctctgtcgcccaggctggagtgagtggcgtgatctccactcactacaattttcgcctcctgggttcaagcgattcttctgtttcagccttctgagtagctgggactataggcttctgccaccacacccggcttatttttgtatttgtagcagagatggggtttcaccatgttggccaggctggtctcgaactcctgacctcagcagtttgcccgcctcctgatctgccagccttggcctcccaaagtactgggattacaggcatgagccaccgcgctcagcccaggacttttgatttcttgaactactgacttaatggcttccaagttataaattgcagacttaatagttttaaacatttggttaatttttttttttttacatcatagcattatatttattataagagcttcttagaccaaatttaaatgtaaggataaggtttaattgccttgggtataataggttttttaaagaacagttttatttaggtataattcacatgatatagtgtatttttatcatataaagtattgcttaaaaggaatggattattgacttcagtttacaatttttgagttgtgcaggattgttgttacttgcagtgttaggatttgacttataaagtcttacagagaaagaagtaaaagttggattctttctttaggaagtcacttttaattcatcaataaatatcatgttatgttaagtatgggccaagtacgagtcaggactgttaatgttaaaacatatagacacaggccaggtgtggtggctcacgcctgtaatcccagcactttgggaggccgaggcaggtggatcacttcaggtcaggagtttgagaccagcctggccacccatatctactaaaaatacaaaaatgagccgggtgtagtagcgcacgcctgtaatcccagctacacgggaggctgaggcaggagagtcacttgaacccaggaggcggaggttgcagtgagctgagatagtgccactgcactccaacctgagtgatggagtgagactccatctcaaaacaaacaaacaaaaaatatatagtatagacacaaaagcagtttaggtttcaactttttttttttttttgagacggagtttcactattgttgcccaggctggagtgcagtggtgcaatctcggctcactgcagcctccacctgccaggttcaagcaattctcctgcctcagcctcctgagtagctgggattgcaagcgcacaccaccacacccggctaatttttgtaattttagtagagacggggtttcaccatgttggtcaggctggtcttgaactcctgacctggtgatccacccacctcagcctcccaaagtgctgggattacagatgtgagccaccgtgcctggcctttcaactttcctatacacaaaaatgaattctaaatgggtaaataattaaatgtaaaaaatgaaaattataagaacatataaggaattcaaaagatgagatttaattatattaatgtaaacaaaactcccccaaagctcagatatggcaaatataaacaagattaagataagaaaccaggcctaaccagaagccaatgactaaggattagtgatctgaatcatagcaagatcttttgcaaaatgagcaaaaggcaattcgtaggggaaaaacattgctaataacatttgcatttgtttttaaagagacagggtcagcagggcgcggtggcttatgcctgtaatcccagcactttgggaggccgaggcgggtggatcatgaggtcaggagttcgagaccagtctgagtgaccaacatggtgaaacctcatctctactaaaaatacaaaaattagctgggcgtggcagcgggcacctgtagtcccagctactcaggaggctgaggcaggagaatcacttgaacccaggatgcagaggctgcagtgagccaagattgcacgactgcaacttcagcctgagcaacagagcgagacactgtcttaaaaaaagaaaaaaaaaaaagagacagggtctccctctgtcccctaggctggagtgcagtggcacaaccaaagcttgttataaccttgagctcctctctctgcttccttttttgtttgttttttaaaaaaatttttgtagagacccctgtgttgctcaggctggtctccaactcctggacttaagcgatcctcctgcctcagcccatgtgcatttcgaataccctagtaatatataatgagatgctatgtttggaaaagtaaataattcccaactctacaaaggctgcattgaagatggagacttttatacactgttggtagggtaacctttctggaaagctgttcatgcatgtattcagtttatcaaagcctgaaaaaaactgttcatactttgactccatttttagaatattgtgttaaggaaacagatttaaacagaaatttttgtataaagaccctgtcacttgggtttatctaatagtctagtggaaagactctaataagagtcagatactagaaaatagttaacacagtttatggtgcatgcatccatagtgtagagcatatttagccatttttttattttgaaaaagttgttgtagtttggagaaacatgattttaatttttaggcagggtatggaactatatataaatgtgatcttaaatgtgtaaatgtatttactaaataaactctgaagtatctgcaaaacaaagtactagtagaaaacacctaaaatgttaacagtgatcatatttgggaggtaggattatgagtgaagcttcttttctttatacttctctatataatttctatataatttcataatgtgtaatatattaattataaaatacacgtttaaaatgtatttttggacattttctaaactcgagagagcacattagttaaaagaaattaaatattttcaatttcatttaggaagaagagctgagaaaagccattttagtggtgtttgcaaataaacaggacatggaacaggccatgacttcctcagagatggcaaattcacttgggttacctgccttgaaggaccgaaaatggcagatattcaaaacgtcagcaaccaaaggcaccggccttgatgaggcaatggaatggcaagtatcatgcttccagaagccatctgtgcatttgtgtgtgcttgcagctatgcacgtccacgtgtaatttttctcccgtgttgaggatgaaactttgatttacttagcagcttatttcataagttcctcaagcgttttctctcactggtcttcaggtgcatctgtcttctcaaccacacctacctgattacagttacttagataagcaaattctttgccaatttttagccttttccctgcctcacctcaccctccaattccttatccttcaggaattagcttaagactctcttctgaagagcttttcctaatgtatctctattcctactgcctaatcactcacttaaagttagatgcccttgtcacagattagtgacatagtacttgttttgctgtcttgtaagtttgatttgttcatctactcattagataatcacctccttgaggattgagactagtttcacctctgagtcatccatatgtagcccagaagtagtagtagcctggaaaataggtatttggtcttttttgaatttttcattcaaatcatagacaaattcaaagcttagaggaaccttatggatatctagtgcataacctcatctgtgttagctgtcatcattttaagtactttggaatccacctccaatacaaagtttattatagatgatcatgctttatacctgaaaattaattttataaaacagttcattttctctttacaggttagttgaaacattaaaaagcagacagtaattcagtccattcttctcccctgaaatgaagactacatcacctctctccctttggaaacagtcaagtgtacttcacactactagatgttaaaactatatgattattggcatatactgactgactgcaatatttgtagtaaatagggaaaataagtatttagttggagggataatttgatcgaatcacctgaatgttctatgtaatgtaaaatattcttttcttgctttcttgtgttaaggtatatattctatttgtatggaattcttattcaaatacagttctattaaagagtatactcctattggatgaaaaaaacctatttttgaatagtagttgcagcttgtttgtataaatactaaaaaatatcttaacagatttttttccccttaaaatgaattatctttccaaagattagactcagtatgagagtaggtgaggaacatagtttgtgtaatataatctttatttgcttacctgaccactttttattaagctgttttgtttaaaagcttttggttataggcatgaatattgttttgatggttaacttcactgacttatctgtaagtgtcattttatagtactttacagttgtcaaaaaaaatcttacatatattgatctagttgatcggtagaggaagcttgtgaagtaggtaggacaggttatgatgtcttcactgtatggacgtgaacccagggttctaataggttggcttgcccaaggtcacctgctagcttgtaaggtaggaatagggctcaaagtaaaacttttggttcagaagcttgactcataaactatactatatattcccaaaaatgtcagtattgacaacacagtctaactcttaaataaaattatgctaattagttacattcaaaataatgtttataaatttatttgtctatactagtagaagtgatcagtgacatactataaataatcctaaatggttatatttgatagaattcataacacattaaagagaaaatttcacattaaaggaaggtttaaaaatctattttcagattataaaaggtgtctttactggttttcattccttttatctacatgtaattggacatgtaaacttgttaaaaatcaaaatcttactgattgtacagggagaaattaagcattctgttttaaaaattaggcttattgctagactgtaagtttaaaaacaattcatgttcaaaggagcttttcaaattacccagtccaccacagaatcagctaatgtgacagaagtaaatatagtgcgtcataattgctaaaaacagggtgaatttctttcacttaagttggaaaaccagcctctaaaaaattaggtgctggtaatgagagcttaataccatggttccctgcaggtctcagaaacattagtagttcctttcttggccctcactgtccttccagtgttggcctctggcctcttcccctcacatttatgttcattctccgggcttatattcattctctgctgctttctcccttcacccgtgggactctcacccttcttgctcattctccagcacccattcctactttagtctctttgaaatcttttttggagattttccttcagctacaaatgttccagtacaaccaatattactcctgaggggcaaagactttttcatatttatgtccctagtatctggtatggcgcctggcatatggcatttcagaatatgttcatagttgaaacagtaggatagatatttgtcatcttgacaagtagccctttgcaatttatacttgagttcactcctggtcaatggcacatggctggaaaatgcagaaagcaagttcacttacagcctgaggcttataaagcttgtacagctgcctcccggcagtccaggaaaactgcaaaaaatgggaagtaaggtcctggcaggcagacccggcatgtagccgctggccatcttgaatcctagggcatgaagttgccccaaagttcagcacttggttaagcctgatccctctggtttatcacaaagaataggatgggataaagaaagtggacacttaaataagctataaattatatggtccttgtctagcaggagacaactgcacaggtatactaccagcgtttggatattgatatatacatggcaaatctgaatattgttttatgagaggcctggcaatgggtaaaacaccaaacttgaaatcagaacataggtgcaaatggccactcctgtagtttcttttctgtaaaatgggatctggacgaatgataccaaacgtttctttctaacattgtattttataactctggcctatgattgtgttgtgtcttgcattaaaaaaaaaaatttgagagtggtagaattacttctgttatctgaaatacctgagatgcactttaaactgttgaaatgtaagctctgagggcagggaccgtatcttatttactgttagtatccgttgcatctagtgtggtgcacctggcacacagtaggcactcaataaatatgtattgattaaaaacaaagacgtcttcaatatgccaga

SEQ ID NO: 6 - DNA, 9927 bp, Homo sapiens
ggttcccgtgacgcggcgcgccccaagggccggctccgttgagggaagggaagcccgcccggtggcggctggggtcggctgctgggaggaggtggtgggctggttcggacgtgggtcgaggctgtagcaggactccaggtgaggcctgaggaccactctgccctcccgcggcccgggctcgcgccgggggccatttaatcccgacagcttgcggcctgacgtcgctgcggcctggcagtgaccatgtcggcgtccggcccctcggccggcgatagagttgcggctaaaatgaaaggacgcccagttacatttgcatcgtagataaagaaagagcatttagtataagcatgtccgaaatgttgcgtgggatgtaggcatactaaaaccttattcgtggcctgtctgaaatccaaatggagctgggtattctgtgtttttatttgctaaatctggcagccgtacccgcggccccgggcagggagggagcagctgggctcggccagaccctgccggcgtctggggggcctgcgaagtggaggggagacgggcagccgggcagtggccggcgttccccggagctcggaccggttggattggactccgacgctaccgctccctctgctgaactattccggatgtaaaacactagggatcggagtttttcttggttttttaatctcattctagtgaccgagaagcttgctggcagtgcgctgatggatctgtgtgaataggccatttatttgacctcttcagtaacactgttctaaccggctgaaactgctttcttaggcattttcttaaaagcttggtggttaagagcacggaatttcgagtcagatttccaatcttggctctatcactatcctcggagtcatggggcagtcacatcatccctgtctctgtaatggtagctgcccctggataagtgttattaggtgattcagaagggtgggctgttgcccttgcctgaggttgcagtctgcggttcccaagccccaagacccgcctcagaactaactgcatttgcttttgactcctggcctttctctagggttgggaagaacatggaaagtgacctccctgccaaataactcagaagaggagtgtcggtagccaaatgtttcttcagaatacgtgtaaaagaaatgtttttcttccatctaggaagatgttaccgagtacttcagtgaattccttagtgcaggggaacggagtcttgaattccagggatgcggcaagacacacagccggagcgaaacgctacaaatatctgagaaggcttttccgctttcggcaaatggactttgaatttgctgcctggcagatgctctacctgttcacatccccacagagagtttacagaaattttcattatcgaaaacagacgaaggaccagtgggccagagatgaccctgctttcttggtcctgttaagtatctggctctgtggtaagtgtgtttatctgagatagaattgaacgctgagtgtttctgattagattttttgttataaatgtgttgtgggtcagaatctggaaatattggaaactatttctcctttttactgaagcctcaaaaaatctcacaggaaagaaagttgtagtcttggttctacaggtcccaagcagatgccagagtaaactgttaccctaggacattgaaaagcaggggacaagattcactccatatctttttaagtacttgaatcggtacccaaatgtcagctgactgtgaataggaatatgaaactggaaattgcatttcacaggcaaatccacagtgagaattgtaaaggtattgatgggaacctgagaaactgaagttctccaattccataatgcaagggtctcatttacctgtagggtgttgaagtgggtaagatattgaagtttatagggtgttttgcaccttaactggacttaaactatgttagtgccttctctacactggcgttctaaatactgaggccaccgtggtgaatcagcctggcaagggcccacctcaggaaacttcaactctctcagtggccacgctgtgtcccaaggtagtgttcacacatcttgggagttttgtttaaagacctgtctctcccactagcctgggcatctggagggcaagggatgtgtcctgtatttccagaacctagcagagtccctaaatgaatcttgtgaatctttctttcagtgtccactataggatttggctttgtgctggacatgggattctttgagacaataaagcttctcctttgggttgtactcatagattgtgtaggcgttggtcttctgatagcaactttaatgtggtaagtaccataactttggtttttcagatactgctgtagcatctccatttgtttgcttcagaggtacaatagcagcagatggaaattgaaacccaggtagagttactaaatgatcaattttgactgccaagattattacaattttccctcctgtgttgccacctatatcagaaaatactataaaggctggtttataatattgtcaaatgtagcaaataattgaaataattatgttttgaacccaaaatatctgagatcggtctcaatttagaaagtttagtttgccaaagttaaggacatgcctgtgacacagccttaggaggtcctgatgacatgtgcccaaggtggtcggggcacagcttgctcttatacattttagggagacttgagacatcagtcaatatgtgtaaaatgtacattgttttaatccagaaagtggggaaaggcaggttacagttagataagagacaaatggttgcattcttttgagtctttgatctgcctttcactgaatacacaatttacttgtgagaggcaggtacaggaatagtcatttatgccttaatctggctcagtgagtctgcatttttacataaacaatggggcagaggaagcaatcagataaacacttgtctcaggtgagtagaaggaggactttctgtcccacacctgtaaagataagctatcttaggaataaaataggaggcaagtttgcctgacacagttaccagcttgacttttccctttggcttagtgattttggggtcccgagatttattttctgcatactaacaaaatgcctggttttgcaaaaatattacagatttagccagttctgcttaagttgtctggatgatagcatggttttctgcatttgtcaatagagaccacttcttgatattcattgtgtttaaatccatttagatctaaagggttattttgtggagtcttactttgaatctttgcattaaatgaagtatacttgaaaaagaaggattttttttttaaacttctcatgccttcctactgagaataaaattctctctctttctctcatacacacacaccctccgccccccccgcccccccaccgccacacacacacacgggctttatcagaagggttctcagtctgactttggttgatttagcaacagcagtgtactgaggataaatctggtgtttggtaaagtcctcctgtgtggttggcatgctggatgaagggcaggggatgtggctagcgatctcagtagaggaccagtggttgggtagacatggtggtcattgtggagaacattttagttgcagagagacctgggttcaaatgccaacttagttatctgtgaaactcttagtcccagtctcttcttttacaaaatctagttaattacctattctgtccaatttttgagataattatgttatgaaaattacctgacacagttaagtgttcaatatttggtagttactaatattttaagcaaaactctgcaactataacttctgataccagcctttttttttttttctttgagacgaagtcccactctgtcacccaggctggagtgcaatggtgtgatctcagctcactgcaacctccgcctcccgggttcaagcgaatctcctgcctcagccttctgagtagctgggattacaggcacacaccaccacacttggctaattttcatacttttagtagagacagggttttgccatttggccaggctggtctcaaactcctgacctcaggtgatcctcccgcctcagcctcccaaagtgctgggattacaggcgtgagccaccgcgcccagccaataccacccttttacaggcatagttcagatatgctagttccattccagatactgcagtaaagcaaatatcacaataaactgagtcacacagatgtgttggttcccagtgcatattaaaatcatatttacactgtactgtagtcttttaagtgtacaatagcactatggctctaaaaaacaatgtacagactaatttaaaatgctttattgcttaaaaatgctgacacagagacatgaagtgggcatatgctgctggaaaaatggcacaggcagacttgctggacacagttgccacaaaccttcaatacgtaaaaatttaaaaactacagtttctgtgaagcgcagtacagtgcagtgtggtaaaatgacatatgcctgtattttcctttgtaacttctgactagtacagcagagcttttgtatgtgctagttagccaataaatgctgtccactgttaatataaaattctaaaatctggcctagaattaatactaatgtaagtcacgtattcattaccaagaaattcatgaaaaacaaatggtgtgttttaaaatttcaataaataagactttcaaaggaatagtttcattcataacaagcattctgccctgaatgcagtaattctggaggccactgtcttagtctgttctcaatgctgctataaagaaatatctgagactgggtaatttataaaggaaaaaggtttaattgactcacagttctgcattgctaggtaggcctcaggaaacttataatcatggcagaaggcaaaggagaagcaggcaccttcctcacagggtggcgggatggagtgagtacaagtgggggaaatgccaaatgcttataaaaccatcagatcttgtgagactcactgactatcacgagaacagcatgggggaaattacgtccatctggccccacccttgacacgtggggattctggggattgctgttcaagatgagattttggggacacagccaaacaatatcaggcacagaaggggaccaaatcagcctggagtttagcacatttcatgtgagtctgtatcatagtttgaattaaatagaaagggattcagtgtatttttgagaacctatgttgtgtgaggaactagaaagagaaatgactacatgtaatgatgaccatcacagaggagctacagaagccagcataaggtggtggtttgtggagatggggaatagttgactcctggtgctgggaattgcaagtgcaatggcatagaggtgtgaacagcacactaggtctgggagcatagggtgacaccgagtcactggggaagagatgtgactagagaaattggccttcatgccattcaggaaaaaaattggactttatctcatagactgcatgtgtgggttgggggcaaaaggaggtggggagctttgaggctttaaagtaaggaaataatgtcaaactcacactatcttttccatggcagtggaggaggcaaaagttggagtagtgagtgggcaaggctggatacacttgcagaggtctgcgtaggagtagaggaggcccagatagtatggtggtgataggaatagagaggagagatggattcgagagcttcctgagataacaaggtatgaggggggatcaggaagagggagtgggtgggaggctcctttgggatgacctgtaagattttggcttagatgactgaggaagcagcagatgcagatgaagcagcccttgctggcctgttgagttcagggagcttcctgaagagtgaaaagaaggtcagtagacactgaggttgatgactctagacctagaggcaagagtctgggccatgatgagcctctgactggcgttaatatggagctgggaggtgaaaaccacagtgccttggagtgctctcggaaggcacatctgtctttcagaggaaagactctcactgaggccagaagcttgaaaagcgcccatttgggataagcgggagaataggggcagcagagaacgtctacagaaagggcgctcttggggagcgagctacatactgattccataaaatttgaatggcacacattcttggctaaaaaggaaactgtcttggtaagctctagtttgttcagtattgttttggcattttcagataacgaaatgcagggactgttaacattagtattgtacctctgtttattttccatttttatccccagtgacggaatagcgtattcttaattgtacccttgagatgaaatgaaataatacattaaaaaatacattgaatttccaatatatgtttataatacaagttttgttctttgaagatcttacttttctgttacttggatattttactttttattcatcattgaactgaaaaactagtaggccatgttgtagaacagtgacatacacttgaataattgttcttatggctggatgcgtcactcttcctaactgcttcttactatttcatcctccttttaatagggggttgacccaggtcttgggccttgggcctgttcattatccacattcatttttttggtgacatcattcaggcccgtggctttaaatattaatatcatctacacactgatgagtttatatttccagtttggacttgtcttctaaactctagacattgtatacaacttcttactccatactagttggcatcttcaacataacaggtccaaattcaaacttccgcacactccttcccacctcaaaaccactcttcccacagccagccccacctcaattaaaggcagctccatcttccatttgttcaaggcagaaatctctcagtcatccttgagtatttttttctcatactccaatccaataatgtcaggagctctaccttcagagtatcgtgtgtgccacatcttagcacctccactgccaccagcccctctgctcatctcttccttgcagtagccttctaactggtctctgctgccagtcttgtctctggagtctgttctcagatccgccaccagggaggctctgtcaaggcatttaagtcaaatacttttctcagaactccacagtggcttctcacgtcaccaggaataaaagccaaagattgtaaaacggccacaggcttcgtaagacatggagcctgtgtgacttgatgttgggcccaaccctgtttcttttctggcttcatttcttgctccttttctttcagacactggtcttttcaccattcctcaggcctgccaggcaccatcactatccttgggtctttacccaaatgttactttatgaccctcatatgtacaattgcatctcaagtttgtattctccacatttctctgctgctttctctctttccataataccatctgacataggtgtatcattgtcagccttccttcctagatggaaggcagggatttttgtctgttttgtttactggtatatctccagaatttagaatgtctgccgcatagaaagtcgtcagtaaacatttacagaattcattttattatgaaagaaattttaattttgctcttaggttcatctctaacaagtatttagtgaaacgacagagcagagactatgatgtggaatggggctatgcttttgatgtgcatctcaatgctttttatccactcctggtcattttgcattttatccagctttttttcatcaaccgtaagtagcagttaattagagtattatccaagtcttcattgcatgcattggtaaagggactcatggtctgcgtctcttctggcagatgttatcctgacagacacatttattggatatttagttggaaataccttatggttggttgcagttggctattatatctatgtaactttcctgggatacagtggtaagtaatttttttaaatgtttttggttgagaacatagcaagagggggaaagttgtaacagtagtacaaacagctgcttttatggaacacttacaggcactatcctaagtattttatgtgcattatctcatttaatcttcatgacaattacacaggtttgtttctgttttcaaatgaggaaactgaggcagagagattaagcaacttacccatggtcatgcagctagaaaatggcctagctggtatataacagattttatactttcaaggaaacatgttaaaccatactggttatctccagatgacttgcaggaatccaagaccattcactcctcttctcccatgctttcaggttgtgggttaccagcaggagggtagagcgaagaaaggtggggcccagcatcttgttacataggtctatgaactgaagttctctaaagccttttgaatcataactttttgccccattcttagttttcatgattaccgtatggttctgtagacaatcacagaagatcgggcccaacatttattgtcctcaggacatgtttgcagatttactgttaaatcctgttgtcagttcatttttcttaatatgaatgaggaacatatattatttttcatttatgttaagaaatgatcccattaaataaagccaaataaaatctagagactgcgctgtacgtttcttaccccttcctttcctgttactgtagatgattagggcctaactgtaaatacagatggctctgactatgcctggctccggagttattcccaccccggttctctccccccttggctggtttgtcagggaacacttaaccccttcattgtaatgccttgtttggggagtgctttctctagtccaggggagatgtttgtgtcatttctaatgaattttgaaagtgttttgtgatgagaacactgcagcactgtggtttctctaagtggttatttgaacactcctggtaacgacctataccacttagaatagttggagtacagctcagtttgtttaagaacttcctatatgagaaatacttaggtcgggatgcatggggtagggtcccgctaactaagcagtgagcaagaaacatcaatatttggagccagacttttatatttaagagtttcagttcttttctgaagcctgggctactagttgagctcacaccctcttaaagtgggggtataatgctttacactggaaaatctcaaatagctaaaagatgttttcctataacgccatccatctctgtactttaagttggactcctagaggtttctgaggcagtcacaagtttaaattcaccactgttttcatgaatatttgtgacatttctccctcattgttaacctctcttggtccagtgtatgatgtcccactcagcctctgtgctgaaataattcctctcctaggtttcttcccagccctagacaaggaggaaacagcacagaggggttgggaagagtagtctagttctgggcataaatagcatcatcttactgattcaaaatatgcattcccttccaccccacatgttgaagtaagctgtctttcaaaatgttcatttattagtcatttatttttttttttttttaaatcagtttggattcctttcttttccagcattgccatttttgaaaaatacagtaattcttctgtatccatttgcacctctgattctgctctacgggctttccctggcactgggatggaacttcacccatactctctgttctttctataagtacagagtgaaataaaaagtgagaagaagattcaatcgtaactgtgtcaacagtattgtgaagtgatcatttcttgtaaaacttgtaaataaactatcatctttgtagatatcttaaaggtgtaaagtttgcaaatttgaagaaatatatattaacactgtggtcaggtacattccttaaaactaattaaatgtacatttctataataaatattttttaaactaaa

SEQ ID NO: 7 - DNA, 49743 bp, Homo sapiens
gccatccttgcccagccggtgtggtgcttgtgtgtcacagccttgtagccgggagtcgctgccgagtgggcgctcagttttcgggtcgtcatggctggctacgaatacgtgagcccggagcagctggctggctttgataagtacaaggtaccgcgggccggcggatgcccctctccctgctcccggcctcgcccaggcggctgaggggcccgcgcggcgcggtccgtgtcaccttgtgccgcgtggctccgggcgggctggcgggcgttcctccggaggtcctgcgggtcctggggattgggggtcggggagcgtgggagcatcctaagcccgccgcccgtagtcggcaccccccgggagatttccttttccttaggagagcgctcagtgatcatggagcgagggaattcccttcctattttttttaaacttattattttcgtaagcccccgaaaggatggagttccttctgttgtgtcaatcgccttcattttagtgaagtttccactcgcctgtcatgcatacaacttcggaggaggagatgatcgtttggcagatgaggcccgggaggggagcgacttgccgatgccatcctgctgatgtctccacttctgctcccggcagggacttcctaagcggcagcttgtggcgctagggccaccagatgaaagggaggtgcacaggaaggagctgtggagtggaaagagcgcgggctttcgagcacatacaaacctgattacaaaagtcagatttctttatttcgtcttgggcacgtcattttaaccccgctcagcctctcttttgtgtatgaaactgaaagtaatagcttctgctgtgcaaaatgattagaggaatttgtgaagcgcttggcaacatactaggaccccagtaaataaatgcgggtggttaactttcctccaaatctggttcccatccgcagttcctttaccaatgaatgactctaaccatccagtcgaccaagcctgaaatatgggctttaacccttcatccttgttgttacccgttcatcttcacatcttagcttaaatattgcttcctcaaagaagccctccctacgtgcccctttcccccttaaatgtgcgctctgttcgtttatggaattgctgctttagcgtgtctcgccattagaatataatgcccaactcattagagttttcttgtggaccatcatggcttaagcacagtgctatgtgcatactaggcacccagtaagcatttgtggaatgaatgaataactgaaaaagtcataatggattttgtttaactcgagttaaaaaaaaaaaaagcaagggtccttagaaggtcacatagcatgtttctctgctttcaagccgtattgtgccataccattctgaaccgaggtgatgacttgtcttaacattttaagtggaaagagggtccagagccttcttggtaactcgggccagtgcttttcaactttcattttagaaggctgttaacccagatacctcctgttttgccttaagctctactccccttttgttgtctgttctgcagggtaaatattgacatataaaacattttcttccttactagggtctgactttctaagtgccaataaaatagctatttcaatgggagcagtgtttataataggaaatctcctttttcttataaagaatcttccctagatttatattttcaactaaataagtgtcttaatttactagaagtttcgtgtaattttctgttctgatctttcccccttttttattatataagttcctgtatctgacagcagatgacttcctatcatcctggaaaacaaaggtcgatttagcaagcgtccaatgttcactaaaatagtttgttgatatcattttagttataatgaggcttccttggggaaaaaaaagcacacatttataacctaaatattcttctattgcaattactcaatactgcatttatattaaaattatgaatccagtggtatccaaaggaaaaatccatgggatcagttttgcttgaacacaaatctcacagatctttttttcttatcgttgcgttccccttatgttgtcttcagatagtaagcgctttataaatgcttattttaaaaagtcttttttccccataaatgggtaaagattgaaaacactcaaaagatattttgtattccctcatgtgatgctttataagagggatgtaaagaagaactgacactacaaaagcagttggtggaaaaattacttttgaagtagtttaatttatcttccctagaggtatatctgagagctacagttggaaacctgacagatatacagaataactgctgaaaggggtgcacacggggagtggaaattaggtttctgaagcaggaaactataagacaattgatttttggtatggaagagcgtgggatggattctgtgttatgtattgacacttgcattcgctattgtgttacttaacgcaattgtattaaacagttagttgactattagttgaatgtctactttctcttttaggacgtgagctttaagagggcaggccctatggctgacttttttttttttttctttaataacatgactgaggtctagcacagtaccatgaacagagtaagtgctaaacaaatattgaaggaatgagaatgtaaaagaatcaaccattttggaagtatggttaaaaaaaaaaaaggagctctatgtctggatattgaaagggtgcttttgtattttaaatgtgaagatatcaggtttaactgccattgttctctgttgcttattaactaaggtaacttcagagaattatactgaaggatttcagccttatttttgcctctacccatcctttgttttggacaggctttttttttttttttttttttttttttttttttttggagatggaggtttgctcttgttgcccaggctggagtgcaatggcgcgatctcagctcactgaaacctccgcctcctgcgttcaagcgattctcctgtctcagcctcccgagtagctgggattacaggcatgcaccacctcacctggctaactttgtatttttagtagcggtgcatttctccatgttggtcaggctggtctcgaactcccaacctcaggtgatccgccctggcctcccagagtgctgagattacaggcatgagccaccacacttgtctttttttttttttttgagatggagttttgcttttgtcgcccaggctggagtgcagtggcgcgatctcagctcactgcagcctccgcctcccgggttcaagcagttctcctgcctcagcctcctgagtagctgggattacaggcgcctgccaccatgcccggctaatttttgtatttttctttgagacagggtttcacatgttggccaggctggtctcgaactcctgacctcaggtgatccacccacctcggcctcccaaagtgttgggattaaaggcgtgagccaccgtgcccagcccttggacaggtctttatagttgagggatttttccccacttatctaagggtgaaactgcaagttggtttttttttttttttttttgtcctggtttgctcatcatttgggaaggcaaagttttaattgatagtgtagcagctactttgaaattgtatcattttgcctaagggaggaaatattctgtgaaatatcttgtttggttggttcgagaaagttatttgtctgggcacagtggctcatgcctgtaatcccaacacttccggaggctgaggtgggaggatggcttgaggatagaagttgggcaacatagtgagacctcatctccacaaaaaaaaaaaaaaaaaaaaaaaaaaattagccaggcatggtagcacgtgcctatggtcctagctacttgggaggctgaagtgggaggatcagttgagtctggaagttgagctgcagtgagctatgattgtgccactgttttgcagcctgagcaacagagaaagaccctgactcaaaaaaaaaaagtgtgtgtgtataaatatatatatagtttcatgatgaactggtttttgatattatggtaattaattaacttggctctcaacaacagcctgattataggaatcatgataattgtgaatttattagtattacaattagaggtggtaaagagagattgtgtttgcatcttaatggtaatactaaagaaccagaatctggcctttaaccttactagttcctgaaaatttcataaaaaattattttcattcttatctttttttagagacagggtcttgctttgtcgcccaggctggagtgcagtggtgcgatcatagcttactgcagccttgaattcctcaggtgatcttcctcccttggcctcacaaagtgctgggattataggcaggggccaccgtgcctggccatcatacagtttgattttgtttattcaacaagcatttattgagggtctactcagtgtcaggcatagcatttgggctgcaaaattaagctaagttgaaattcttgtcttcaaataactcagtttggtggcatgtgaacatgtaaatgaacagttataaaaagttaataagtccagttaggcaagtgctggctgctatggaagaggagaggaggcagcttccagggagtgggagctagagttgagaaagccttcaggggatggaggtgaaggcaaagctcagtctagaaagatgaatatgtatatttatattatatagagagaaggagagagagagagatgctgctccatttatgatgggtttctgttcctgatagacctattgtagtcaaaaatacatttaatacacttaacctactgaacatcatagcttagcctagcctaccttaaatgtgctcagaacacttagattaattcgcctgtacttgagcaaaatcatctggcagtgcagtagagaattggttgttcactgtttgtttgtttttttttttttttttttttgagacggagtctcgttttgttgcccaggctggagtgcagaggtacaatctcggctcactgccacctccacctcctgggttcaagcaattctcgtgcctcagcctcccgagtgtctaggattacaggcacgcaccaccacacccggctaatttttgtatttttagtagagacaggtttcgccatgttggccagggtggtcttgaacttcggacctcaggtgatccgcctgccttggcctcccaaagtgctgggattacaggcatgagccactacacctggcctgttcacccttgtgattgcattactgactaggagctgtggctcgctgtgctgcccagaattttgagagaatatcatagcactttctaccgaatgcgtgttgcctttgcaccatcgtaaagttgaaaaattacgagtgaaactgtcataaatcagactgtactaccaggttaagaggggagaaaggcattatggaacaagagagcaatggagtgtaaagtgatgaaggcctcggtattttctgggaaccacaagaagttagataaggtctttagacataatggtggagtggcaggagatgagactggagagggaggtggggtgctgtcagaggggaatgatttgatgtaaaggacttctggatttgatcctgtagatcactgtgtggttcaaggactgttggcatcagaatcacttcgggagggtctttagcaaattcctggctctctttgggagatacagattggatagattgcggttatttccatctttaacaaatacctcaggccaggtgcagtgccttaggccttaattccagcactttgggaggccaaagcaagtggattgcttgagcccagtagtttgagaccagctgggacaatatggtgaaacccagtttcaccaaaaatacaaaaattagccgggtgttatggcgcatacctgtgtcccagctactctggaggctgaggtgggaggattgctgaagcctgggaagtcaaggctgcagtgagctgagatcacgccactgcactctggtctaggtgacagagtgagaccctgtctcagagaagaaaaaaaagccaaatatcttaagtggttcttaggcacattatagtgctataggttttggggagccactgtttaaaattgaaatctagacaggatcacatttcaattttaggaagctcactctggcagcgtgtagaagatggagagagatagaggtgctctggaggccttttaggatgcttctgcataaaactaagttaagaaatgtcaaaggcctgaactaaggggtggggataaaaaggaaggagtggggattctaaagatagacgtcaaaacaggttgacctgcacactgaatttagccaacagttatgtttaatttggcccacacttgctttctttcaaaaattagtatctctagccgggtgcggtggctcacgcctgtaatctcagttactttgggaggccgaggcaggtggatcacgaggtcaggagttcgagaccaccctggccaagatggtgaaaccctgtctctactaaaaatacaaaaattagctgggcatggtggtgtgtgcctgtaatcccaactacttgggaggctgaggcaggagaatcgcttgaatctgggaggtggaggttgcagtgagccaagatcgtgccactgcactccagcatgggagacagagcgagacttcatctcaataataataaaaaaaattagtgtctttctcataaaagtccagatttctggattctcttgaaaaaaaaaaaaaaaaccagaatattggactatactggccctgaacttcctcttgacaagaatcagctgatgctgaatagtgcttgccctctttttatttgctctctaatttgccacttctctaccaatgcatatgctttatgcaggaatgctttgttcagtttacctgctagatccctgtgatccttgatttgaagatacaagattggcagaacatggtgactgactagctggaggtggtgtagagggccacataaaagacggggaggagtctaggatgactcaggttctggtaggatgactgggtggatagaagtggtagtcactgaggcagggttttatgaaacagcatactgttttatatatataattttttaaaaaaatacaatagtgttttgcacaggtcacttctcttggatgggaccacatgaaagtgtggcttatggacttggaattaaaacaaagaaaacttgtaaagaaatctcatttgtgaatgagttgtcctctattagaggacatttctgtaaaaatttcaaagatacgaacacttttccttttagagcctcaatagaacatgagaaattcttgatattttgattttcatttattatgactacaagctgactacaatacaatatgttaattatggcattgcctggatccattacagttaattgaagcataacttatctttaattgtacctttgtcaccttgactagatttggggaactgccctctgttccctgtaagtacattaataaggcttgaaatgtattctagttgtcttagatagtgatttatatatgtctggcagaaagaattatttctgcagttggcagagacaagaaggatgggtggaaaactgcagaaggggagagatttagtggtaagaagatggctactacatttttaggtgctatttggaggaaacatcttgaattggatcttttactgccttctgaaataacagttcactgatgatggcttgtttctctaactgctgtagtgcttaaatattaagaaattctttgctaaataagagtttgcctactgcatacgggaaactcggggaaaggtgtgccattcaaagacacccgtgggaaccaaggcacagagactggaaagaccctggtatgttagaagcacaaggaagtggcgggtgtgtaagtgaccaggccgagccttgggagctcagtgagggaaagcattatcatcataaatactgaataacaataataatgatagcaaacatttatatattgtatactctgtgccaggcactgctttaagtgctttatgtgtattatctcatttaatattcacaactgccatctgagaaagaggtactattttccctgtttcaccgagacactgaaaatttaagtaatttgctcagggtcccacagctcgtaagtggtggagctgagatttgaactcaggcaatcagtctggagtccatgttcttcctgctattctgcctctcaaaactaagagtgaaatataaactctgccttgtaggtactggctgtttgtttttgtttttttgttttgtttttgttttttcgagactctcgctctgtcgcccaggctggagtgcagtggtgcgatctcggctcactgcaagctccgcctcctgggttcacgctattctccttcttcagcctcccgattagctgggactacaggcggccgccaccacgcccggctaattttttgttttttttttttagtagagacggggtttcaccgtgttagctaggatggtcttgatctcctgacttcatgattcgcccgccttggccttccaaagtgctgggattacagatgtgagccaccgcgcctggcggtactggctgtttttgtgtaagatatataaacattagaataaagaccttcaatggcatgcttaattggatgtgtatctaatgtacgcagatggggaaaatgtagtggaaaaaacctgattttgtttactctttccctggtttaaaattattagtaggggcaagcgggcctgaatttactagtcttgcatttagttgagcataaagaccatttcatttatgattagctctatttgagataaaaggcttttgattaaataattagcttttggactaatattacgttaaaaagtttccacataccagctgtgtgatacttagcaggtaacttaatctaaccaggtttcctcatctgtgaaatggagtagtacctaccccataggataattctgaaaactgaatgagttaaaatttataaagtgcctggcacatagtgctgtataagtgctgagtaaataaataaaacttgacatttgtgattccctgcacaaatgaacattggctagcatataatatatccacacttatacacatccctggtggttataccaagagaaactattttcagataggaagtgaagggtggcaacgtaatggacagctggaaagagtaataaggagtctgtctagcttgggtcccccagatagtctttggcttcagatttcttctgaaaagaataattatatgtaatagcacagagacaataaataatttttctcaaatactgcaccctatttaagagtcagcagtggcttccatgtgtttgatatccaaattcctcagcaaagatttcaagttcattcactaaatgacgcctccttttgccatatcttctcatcttgttagagcttacttaaagtctagcaagcaaacctgtttgtcatcatgacttgcttgtatttgtctcattgctctaattctccagtctcctattgccaccctcctctctccgacttgttagatgtaaacgacggtattcactgaaattagatctccttgctcaatgagtcatgttctctgtgggcgtagttcttcaagtctctctctctctctccctttttttttttttgagagagtgtctcgctctgttgcttaggctggagtgcagtggcactatcacggctcactgtagcctcaacctccccaggctcaggtgatcctcccacttcaacctctcaagtagctggactacagtcatacgccaccacacctggctcatttttgtattattttgtagaaatggggtttctctgtgtttcccaggctggtcttgaagctctgggttcaagctatctgcctatctcagcctcccaaagtgctggcattattggcgtgagccaccttgcctgggtgagccagcattcctggcctcaagtcttgtattgattaaaagtacattaaaaaactttttatttctgtcctagggttaattatccttccccctactttttttgtattttaagtttagcgatgttttgttttaattagaaataagatctccctctgttgcccaggctgaagtacagtgacatgtcatagctcattgcagcctcaaactcctgggttcaggtgatcctcccacttcagcctcctgagtagctgggactacaggcgtgtactaccatgcctggttaatagatagtagagcattacttggggcagtggactcagtgtgattactaagttgtccagagctcagtatttagtgcaaagatgtgtcagttcagttttcttattggtacatagaagggatttaaatacatgtataaaggacatacttttaggtccaagaaggtgttttcatagttttccttatgttagagccaatttccttcttaaattaagggggactcatttctaatcttctcaaaaatggacacttcacagcatatttagaaagtattttacaagtcattgtactgctcctagactaaacccataattgtcacttgcctgataaactataatagtttctaactggtctctagtttgtactttacccccttcaagtccattttctacatcatgttcagaatggtcctcttaaggaccattttttgttcttagaataaaatccaactccctgtggtcctgccaggtgatgtctgcccacctttccagtctcattttatatcacccttctttatgatgctggagctccattggccttccttcagcatttctgatacttctgttggtggtctttgtacatgttattgttctcctgccttgaaggtgtttcttggcatgtattacatccctacctccacacacacacacacgtgagtcatacagtctttcgttttctctctcttttcctttttaggtaaaaattacatataaatactgtaatacattaagatcttaagtgtataatttactgctttattacatgtgtatatacccatgtaaccaccacccagctcaagatacagaattatttctagtgcctcagaaggtccccatcagtccctctcaccaaactactgttaggacttcttttgccataaatcaattctgtttttgaacttcatataagtggaatctatgaaagcacattgtctttagccttccactcactactgtgtctcatacattctttacctgactgccttctcatctaggactcagcttaaatgtcgccttctagaagctgcctctgaccactctgactaggcacacttcctgctccacttgttctcttcttttttgggagctggttaccatctttactagcctcctaaggctgccataaaaattaccacacactgagtggctttaaacaacagaattttaattctctcatagttacggaggctagaagtgtagaaaaacaaggtattggcagagccacacaccctccaaaagctctaggcgagaatccttccttgcctctatttcagcttccagtagctcctggcctgcctgggcctgtggcagcgtaactccaagcttgccctccctcttcatatggccttcttccctgtgtttctgtccccttgtcctcttcttacataatactcggataattccctttgtagtatttatcacaaattgtgtacatgtggttattttttaaggggtgtggggagcagtgtcttgctttgttgctgatatgctttggctgtgcccccacccaaatctcaccttgaattgtagctcccataattcccacgaattgtgggagggacccattcggagaaattgaaccatgggggcggtttcctccatactgtttttgtggtagtaaataagtctcatgagatctgatggttttataagaggaaaccccttttgcttggctctcattctctttgcctgtcgccaagtaagacatgcctttcgccttccactatgattgtgaggcctcctcagccacatggaactgtgagtccattaaacctgtttttctttataaattacccagtctcagtggggcgcagtggctcacgcctgcaatcccagcactttgagagcccaagacgggaggatctcttgaggtcaggagttcaagacaagcctggccaacatggtgaaaccccatctctactaaaaatacaaaatttagccaggctatggggtgcacatctgtgaggctgaggcaggagaatcgcttgaacctgggaggcggaggttgcagtgagccgagatcgctgccactgtactccagcctggtgacagagtgagactccgtctcaaaagaagacaaaaacaaaacaaaaaaaaccttttatagcccaggctggtctcaaactcctgggctcaagtgattcccccaccccacctcagcctcccaaggcactgggattacaagcatgagccacaatgcccggtccataatagcagtcttgagggaaatatttagaaggtctacgttgattggcatttttacagagacttaagtgaaagcattattagcatgaccagatttatatgctgagagttttggtaggaatagctatttccttggataaccaagccaggatcagaagaaatctggagagggcagaaatgagttgactttagcaagatgaaatgttaaaactttagatgcagtatcacacctgcattccagtagtcaagctcatattagcatagagaaagatggctttgcagtccacgtgagaaaggcctgagggggttcaggtgactgcagtatgatttagttgtcccgggaattaataatatcttgagcagcataagttatcaaggaagaggggcttatagtcatgttctgcttcctattcatataccacttgaaatgctccttttgccctagaccacatgtttgtgttgatttaacaacaaattggattgtctgaagcaggggttgtcaaactgaagcccccagtctgcctgttttagtgaatacagttttattagaacaccgccagccccatttgcttacatattttctgtgactgctttcctgttccaagtgttatgtatttgttgcaaagaccatatggcctgcaaagcctcaaatatttactatatagacctttacagaaaaagctctccaacccctggtgtattaaactagacctagataacgaaggagactgaaaccatggcaaaaaggagtataggaacagatgatgaaaagatttaggtgtgacagggagcgctgtcttcaaatatttgaaagactgtagtttagaagaaaaattaggcctggtgtagtggtacttgcctgtaatcctagaactttgggaggctgagatgggcagatcacctgaggtcaggggttcaagaccagcctgaccaacatggtgaaaccgcgactctactaaaaatacaaaaattagccaggtgtggtggcgggtgcctgtaatcccaactactcaagaggctgaggcaggagaatcgtttgaacccgggaggcagaggttgcagtgagctgagatcacaccactgcactccagcctgggtgacagagtgagactctgtctcaaaaaaaagaaaaattagactgcttaacttgtagagcaaaatgaaaacacaggatagatgatatagggcaggggaggattttgttagtgtatagaaaaattgttttaactttgaattgggttgcttctggaagtaatgagttggtgagtttttttgtttgttttggttttttggtgatctgaggcctgtaaaatgaggcccgatgactgttttacgtcttctcctaaatgagggtcagatatacaatggtgtataaggttaggcatctctgagctctgaggtttttcatggaacgagtctatcaaacccagcctgtggtcctcaagcagttttgagggctctagcttaccctagcctgatagattgtagagccaagcaagtcatgccaggtcttaactggattatctacctggttcaggtttcctggtgtttgccaaaatgtcactccagtggaaaataatacctttaacaaacattaacaaacccaaatctagtctagcacctttaaaagtctgcattttatctttttcatgaacatggaaggttcaagtcattcttcttcttgtgggttcttaagacagtttagagtttgtttattgtgagtggtatgtgaccttgaaaaatactcaggtgtgtaaggcgagagcacagagttttgctgccttctataatctattaatctttcttcctgtttgaactcatcagctgttattgaatgtcaaataattgaaatccaattaggtaaactggcctccttgtgtcaaacttctgatctcctgaagtcgaaatttcatgttaaagcttcagaattttaaaagcggagcttttcaagtcaaaataccattccttaaagacgttcttttagattaaagttaaattatggaaagctgctgaatgaaaatgagcaaacagttgaattaagaacattgcacagttactttgtgcactatattaggtattcatgtgatatcttaaacggttttcttctgatctgaacttacaacttctgtgctttaagatggatggtggacttgaaaggagtgatttttcattttatttgccccgctggctatatttcgtggttctgggtgcagacttttgtgaagtaaaggagtgtagggccctcctatcttgtcattggcagcctgtaggggttcatattggttcctggtcctcaggtctgaagacttaaattcaggcagtcctgtcagttcagaactctttcattctgcacaggctccaatggagtgatatctattatggaaaggctttgtaaactgtagaccatcctggccggcacggtggcttacgcctgtaatcccagcactttgggaggccaaggtgggtgggtcacgaggtcaggagatcgagaccatcctggctaacacggtgaaactccgtctctactaaaaatacaaaaaattagctgggcgtggtggtgggcgcctatagtcctagctactcaggaggctgaagcaggagaatggcatgaacctgggaggcggagcttgcagtgagccaagatcgcgccactgcactccagcctgggagacagagtgagactccgtctcaaaaagtatatgggaggatgtgtgtaggttatagacaaatactgtgccattttatataagggagttgaacatccacagagagtcctggggccaattccccaaagataccgaggggcgactgtatatactattttttcctatacatacacacctgtgataaagtttaggcacagtgagtgattaacaacaacaactaagaataaaacaactataacaatgtactgttattacatttatgtgaatttggtctctctctctcaaaacgtctgtgtgtactgtacttacctattttccgaccctggttggctatggttaaaatgaaaccttggttaagtaggtgactgctgtactaatataagtgggctcctgctgagaggctggatgcagctttagagtttctacctctggccattagaagcaaaccacattgtccatcatcatttcttttttttttttttgagatggagtctcactctgtagtctaggctggagcgcagtggcacaatcttggctcactgcagcctgtgcccccttggttcaaacgattctcctgcctcagcctcccaagtacctgggattacaggcgtatgccaccacacccgactaatttgtttttgtatttttagtagacacggagtttcaccgtgtcagccaggctggtctcgaactcatgacctcaaatgatccgcccgcctcggcctcccaaagtgctggaattataggcgtgagccacgcacctagccagcccatcatcatttcttactactgtctcagatcttttgtccaatttatttcattttagttaggatgggttggagaaatggaagaacctcagacatggagtctgttgaataaacatttggcttattggttgactctttgctaaaagagttgactcttttagcagagtcttgctctgtcgcccaggctggagtaagctccacctcccgggttcacgccattctcctacctcagcctcccgagtagctaggagtacaggcacctgccaccgtgcccggctaattttttgtatttttagtagagacggggtttcaccgtgttagccaggatggtctcgatctcctgacctcgtgatccatcacacttttaagtcttgaaacactgatgtatttcttccatattcataaaacttattcagaaagaaattttgatctttaattatgatttttaaaaatcagatactcaaatgattactacttattttgtatacatactgaacacacatagaaaatataagcaaaggtggccaggtctggtggctcacgcctgtaatcccagcactttgggaggccgaggcaggtgggtcacctgagatcaggagttcaagaccagcctggccaacatggtgaaaccccgtctctactaaaaatacaaaaactagccaggtggtgcacacctctaatcccagctactcgggaggctgaggcaggagaattggttgaactcaggaggcggaggttgcagtgagctgagatcgcgccactgcattcccgcctgggtgacagagcgactctgtctcaaaaaaaagaaaaaaaaaagaaaaactttttcaagcgtgtgactagtataatatgtaaatttcagatggatgaattaggtaatcacccaggtaatactgtgaaccctcaaggagggtttgaactaggctaatattacctagttcaagacttgtctgttaccagttttgtatctcttcttccccatacctagcagtgtgtgtgtgtgtggagtgaataagttatcaacatgacccttaaagttttacatgtttatgtatgtcttttaaaatttcctttacattcttattaaatagctcagtaactggggaataagctcccttaccgtatgaccctaacctattttgtcttcctgtgcgtgtttatgcaattcagtatcctgctatacagggatctgtcattcctttggtacttaaaacatatgtaattataatagctaatacttacgtagtacttactgtaggtcagttctgagcacttcacatatctaatccttatgacaatcccttgaggtaaggactatcatcttcattttacaggtgaagaaactaaggcagagagattaagtaacttgcccaaggtctcacaggtagtaagtgtatcgtaatagtatcaaaaggaaacacagattccgctaagttgagagggatgaaggaggttgagaaggtgtgtggttagtgtgtgaatgcatgcagtgtgcattttgctgatcctgcataataagtgaggacatgtaagcaataaaaatttctctactgaaacaccataatgtaaaagctgattgagagtgaaggatgagtcagtgattatcttggcgatttggactctggttgtatgtgccaatgaaacaaccactgtatgattaactctgcgatttgggttgatctttagacttcccctatgataatatctgactgcttgatagtctttgcctcatttatgttgctattccagttttgctactcagattaggacatcataaaaataggtgtattctccaggttatttttgtattattattattattatttttgagactcagtcttgctttgtcgcccaggctggagtgcagtggcacaggcttggctcactgcaacctttgcctcagcctcccaagtagctgggattacaggcgtgtgccaccatggcccagcaaatttttgtatttttagtagagacagggtttcaccacgttggccaggctgatcttgaactcctgacctcaagtaatctgcctgccttgaccttcccgaagtgctaggattataggtgtgagccaccatgcctggcctgtagtatttttgtactattactttctttctccccctttttttttttttttttttttggagatgggatctcactatgttgcccaggctggtctcaaattcctgggctcaagtgatcctcaggcctcagccttttgagtagctgggttatatgcatgcgccactgcgcctggctttactattattttcacctaagaaatgttattctgtctactagtaggcaaggatttactctgaatattttctttcatttcttaacagtacagtgctgtggataccaatccactttctctgtatgtcatgcatccattctggaacactatagtaaaggtaagataattaatatgtatgtactttttgttttagtaagttttaaagattttaacctattttatggagtattataaatgcaactctcagtttcataagatatttagagaaaccacccttccccaatcacaataccccaaatcacataccttttgatttatcttactgttgaagtttataccctgggatttgtcacttttgtaaaatcccttttaaaatttttctaaaatagacttaatgttatgattatagaagtttgctgattacagagttagttaaaaaatagaggatggaagaaagaatgctgatggagattatcgtttacgtgttaatgtctataacttctccatatgatctttcaaatgtatagcttttattatgacttcagtttgcatgttgtagtatacattggacagagattcctctactttaattattttataattattttgcaaaaataggtatttcctacttggctggcgcccaatctgataactttttctggctttctgctggtcgtattcaattttctgctaatggcatactttgatcctgacttttatgcctcaggtaagaatattactttattataaaatttaactgagtagaaaaaaatgaaatgtggatgcttattttctggttttgttaaaatgttcatatttctaaaaaattttgaatattataatggcatcaccttgcctattgaattagatatgttgtctaaaaagcaatgaggttttggcagataaagaataattgggtttacatgaagatggaaaattaagactcaaaactttgcctaaaaatgaatacaaacagggctcagtttacctgtcagctctaggaatatcccttctccttttctagtcatgaaagaaaaatcccctttcttctgaaggacatgtgattgtctttccttcttcccagcatccctacttgacttgaatgactcctagtttcctctgaaaatgatacttagaccttaagtatttattgctaagtctggacccttattgaggaagagaggaaggaggcacttttggagccagtggtcagcctgctcctgccctctgctccaacatcttctctctcactcattttatcttcactctgtttcacacccagcttctgccccaggccaaagaattgggatgacgagggaatagttggagacaagttttgtttttattgttcagtcagttgattgcattgagaggaatagaaagttggagatagatgggcattttttgcattctaagagaattttccaacagtaatacttagaaatgatgtagtcaggagtgttagtgttataattcatctgtgtatgagttcagcagacttttctggactgacctggagaaactgagtaccactgacaacattgttttagtagaaaaatttggagtttcaaacacttaagacttttttttttttttttttttttttgagacggagtgtcactctgtcgcccaggctggagtacaatgatgccatcttggctcactgaaacctctgcctcccaggttcaagcgattctcctgcctcagcgtcctgagtagctgggactacaggcgtgtacttccatgcccagctaatttttgtatttgtagtagagcagggtttcaccatgttggccaggctggtctcaaactcctgacctcaaatgatccacccgccttggcctcccaaagtgctgggattacaggtgtgagccactgcacctggccaagacttttgatactatagaaattccaaatattgaaagtatacatatgctgaactttactgaaacttttagccatagcttctgtacatgtaataaaatggtaattgaagttggaaatgccaactctgaagcatgagaagatcataaagtacacatgaataaagagtaagattaaattttgttaagcattgtttgggtattgtgggtttttaaaaatttatttatttatttatttatttttgtattttaatcctcaggacaccctaaagaatgtatctttgtaactagaaatactattttctttgacaactctaaataagattatttacttagctattaacagcatcaaacatatgtaaatgttatatatatctccccaaatcatataagttcaaggaccagataaaccatctgttcccaaaatatttggaaaatacaagatgggagagattaaatgatacattcaaggttacactgctggttgattacaaagccaggactagaccctagactttctgattctcagttgttttgtcttaggggaaaaagtgagctctagatatttcagaatgattctgatgcccaaatcattcagttgaggtgatctatctatacccaaatcaaaaggtcttttgtttagctaattaatagtataggaaaggataaggtgaaggctcaatacaagtttgtaatacagtcataaacaagaattagattaaatgcaattaatttctaaattccaaaaatatattatttttcattgtaggcgcatgaaaattatttattttcaagtaaaggtgaacactcagtcttgagttacgataaaagctcaaaataactgcttactgtttgtgacaggctgggatgttgcttttttggttttatcagtttcctggtattatttacgtaattctggattcaaaatatattgtaaagtactttaacttctaatgaacaaatagcgacacttctcactgtcagtatatgctatggtaagaactactgtacttaaactgtattaaaatcttagttgctttccttttcagcaccaggtcacaagcacgtgcctgactgggtttggattgtagtgggcatcctcaacttcgtagcctacactctaggtaaggaattggtaaatacttactatagtcagtgactggtgaatcagcaaggatagccacgtattaaaataacattttctcctgtgcttaattcattttaactagagtttattagtatcctgttcaaattgataaatatgtttttgagtttctttacaaaaaattttgtcattcattgccagggattcacagaataagataagagttggtaaactactacttgtgggccaaatttggtgtgtagcctatttttgttagtagagttttactggcacacatctatgcttattcctttatatattgtctatggctgttttcctgctataaagacacagttgaatagttgcaacaaagactgtatggcctgcaaagcctaaaatatttatcatgcggcctttaaaaaatatttaccaacctctggaataagacatcatttttcttaagtttgggaagcaatactgtcatatgtaataattaaaaaatagtatgatagaacacagtgggaaaacaaataaggaagtgatcaattcttttttggtacagggagcggtcagggagtgggcagggaggcctactgtgctagaccatgctgtctgtcctgccaagaatgcttttcattaggattatccacatggcttgtcctgcattcttctctccttccctgctttatttttctccatagcacttaaaaccatgtaacatgttatctatttacttgcctgcttgtttgttatctctcttttctaactaaaacgttaagttttgtgaaagtgagtactgcgttgttcactactgtatccccagtatcgtagacactcggtacatagtttttaaatacatgtaaaatagcagaccctgacttcaagttgcttagatctcttcagataaaagtgacttgttctcataaaaccagcataacctgctacatgattaaatgctgatatggtagatgtcatgctgaccagagctgcaagagtttggagaaggaagaaatcagtgacgtctagaagaattaagggaaagcttagttaaaagctacatatttaggcagaggtttttgcacatttgttattaaagatgagcaggtctttaagtgctgctgaaggatttggttgccaaggactgctgagaggaatagggaaaagttgagagtggctgtgagctctgacttttgacaacacgccgtaagatccttttgatgtaccatctacttgttctaggcccacagttttctggcaaaaaccctggtctgacatgaactatttgttgcaaaccagtcttgaacgaacatgaagcagtttataatctttattctacctagtgtgactattcatgacattttgctgcagaaatactaagatgtttgatcacaggatgctgctctatgtcctactggggagtctctgataatatatgatatatgccctgaattacctttttaagaaaaaaaaattctaaagcatatctggacctcagacttgtggagatggaatgggtgtagtgagaaaatgtataaaacctaattaatacatagttatgaatttagtattgtaataactgtataggagttacattgaaaatgggaaattgttaagccagtaaataatgagaaaagactttctgggaatattttagctacttcagggcaaaaactttcccaaccctgtataacagaaatctgtagtatttggatagggagtttgggattcatcttttcatatagtcttcaacaatatattatgccacagactgatctaggcactggggaatgtactttggtgagcaagattaaccgtaattataggagttaattccttaatctgaattttttcagttagcctaattctaatgcactagttaacaaaactgtttcttttgggggaaaaattgtacagttcagtgagacaggctgtctctaacaggctcttctgtttctgcctgtaaaatgaaggtattctactgtgctttatcctaaactctggctttctcctcattcccttggtaatggtgattctcactctacagtcttagttaagattctcatgtttatatctagccctgatctgtgttctgagttcctaataagtacccttggattgagttccttgacattaccatgtggatatctcactaacatttcaatttcagtatctaaaattgtactctgcatcttgtctgtcactcttgctgcttattctgacttctttttttctattaacactaccactatcttcgttacccagaatagaaactggagattctcttcttgtccttaggccttatccctcatcttttgcggcattttatcatttttatttcctccatctcacctaccaccagtttctcattcctactgcatttcatctcaggcctactaattagtgtccctctctccagcctgtcattcataccgtcaggtgcctcttcctgaaacattgctttcattcttgtgatttctctattcagatacctttagtaactccccatattccctacaacttttaaactggctcaaacctcctttttgacctttttatatacttcactcttaacatgctagtctctagtcaaactaaggttcttggcattttctgaacatgcattgtgcttttccaccctggtgtgttttgctgatagcattccctcctcttttttttattgatcattcttgggtgtttctcacagagggggatttggcagggtcatagaacaatagtggagggaaggtcagcagataaacaagtgaacaaaggtctctggttttcctaggcagaggaccctgtggccttccgcagcgtttgtgtccctgggtacttgagattagggagtggtgatgactcttaatgagcatgctgccttcaagcatctgtttaacaaagcacatcttgcaccgcccttaatccatttaactctgagtggacacagcacatgtttcagagagcacagggttgggggtaaggtcacagatcaacaggatcccaaggcagaagaatttttctaagtacagaacaaaatgaaaagtctcccatgtctacctctttctacacagacacggcaaccatccgatttctcaatcttttccccacctttcccccctttctattccacaaagccgccattgtcatcctggcccgttctcaatgagctgttgggcacacctcccagacggggtggtggccgggcagaggggctcctcacttcccagtaggggcggctgggcagaggcacccctcacctcccggacggggcggctggctgggcggggggctgacccccccacctccctcccagacggggcggctggccgggcagaggggctcctcacgtcccagtaggggccaccgggcagaggcgcccctcacctcccggacggggcggctggctgggcgggggctgacccccccacctccctcccagacggggcggctggccgggcagaggggctcctcacgtcccagtaggggccaccgggcagaggcgcccctcacctcccggacggggcggctggccgggcggggggctgacccccccacctccctcccggacggggcggctggccgggcagaggggctcctcacctcccggacggggcggctggccgggcggggggctgacacccccacctccctcccggacggggcggctggccaggcggggggctgacacccccacctccctcccggacggggcggctggccgggcggggggctgacccccccacctccctcccggatggggcggctggccgggcggggggctgacccccccacctccctcccggacagggcggctggccaggcagaggggctcctcacttcccagtaggggcggccgggcagaggcgcccctcacctcccggacggggcggctggccgggccaggggctgacccccccacctccctcccggacggggcggctgggctggcggggggctgacccctcccacctccctcccggacggggtggctgccgggcggagatgctcctcacttcccagacggggtggctgccaggcggagaggctcctcacttctcagacggggtggccgggcagagacgctcctcacctcccagacggggtggcggccgggcagaggcgctcctcacatcccagacggggcggcggggcagaggcgctccccacatcccagacgatgggcagccgggcagagacgctcctcacttcctagatgtgatggcggccgggaagaggcgctcctcacttcccagatggggtggcggccgggcagaggctgcaatcttggcactttgggaggccaaggcaggcggctgggaggtggaggttgtagcgagccgagatcacgccactgcactccagcctgggcgccattgagcactgagtgaaccagactccgtctgcaatcccggcacctcgggaggccgaggctggcggatcactcgcggttaggagctggagaccagcccggccaacacagcgaaaccccgtctccaccaaaaaaatacgaaaaccagtcaggcgtggcggcgtgcgcctgcaattgcaggcactccgcaggctgaggcaggagaatcaggcagggagattgcagtgagccgagatggcagcagtatagtccagcttcggctcggcatgagagggagaccatggggagagggaaaccatggggagagggagaccatggggagagggagagggagagggagagggagcgcattccctcctcttgaaatgacatacttctttatctcttatcagctgaaatccaactcattctttatgtcctctactcagatttcacttgcctgaaaagccattctagattatcttagcctaaagagaacctttcccttatctgtactcttttatggtttgtgatataccatacctttattatcatgttttgttcctttctctttttaatttttgagacagagtttcgctcttgttgcccaggctggagtgcaatggtgtgatctcagctcactgcaacctccgcctcctgggttcaagcgattctcctgcctcagcctcccgagtagctgggattacaggtgtgcaccatccccggctaagtttttgtatttttagtagagacagggtttggccatgttggccaggctggtcttggactcctaacctcaggggatcctcctgccttggcctccgaaagtgctgggatcataggcgtgagccaccacacccggcctgttcctttctcaattgtaaattctctgagggcacagtttattctaagattcttccaatccttatagcaccaagaatagtgcattagtttcagtaaattcaattcttatatttgctgaatatccactgtgtgcattttctgaaagcatttaaaattatggaggcagtaggtctataaagaagtgattatgatttcaaacaggatagaatagatgttgtgactgaagtacttttggatcctagagcaaggaggggtgagataagttgtgatgaattactatggcatgttcgctggaagcttgagaatttgtagctagtgaaacaacccaattgttccatagatttggaggtattcagactccaactaaaatgctactttctcagatctaaaattgacaccattcagtgtaatatgacattttgatttttagattaaactttgaagaattatatattttatttctgaaatctttgttttttgtttaaaattttttttagaggcaggatctcgctctgttgcccagactggaatgcagtggcatgatcatagctcactgcaggttcaaactcctgggctcaaacaatcttcccacctcagcctcctgagtagcaggaactacaggtgcgcaccaccatgcgtggctaatttttaaattttttgtaaagacagagttttgctatgttgcccaggctggtctcaaacttgtgggctcaagtgatcctcctgccttggcctcccaaagtgtggggattacaggtgtgagacactgtgcctggccctaaactctttgaagtgtagaattaaataattagatttttatagtaccagctgatagctatacttaacattcctgtgataagctgatttgttttgttttttcctccagtttattaaagaagactttctccatcctggtgcatacgttgaacttttcctgtggtttgtttttgttgcagatggtgtggacggaaagcaagctcgcagaaccaattctagcactcccttaggggagctttttgatcatggcctggatagttggtcatgtgtttactttgttgtgactgtttattccatctttggaagaggatcaactggtgtcagtgtttttgttctttatctcctgctatgggtagttttgttttctttcatcctgtcccactgggaaaagtataacacagggattcttttcctgccatggggatatgacattagccaggtggtaagtatgtgttctaccttaaattttcagtattaccatgatacttttggaaagcttttgtcattgcttatttattgctcttaggcttttttgattagaattgatatgtacttaaaaattttttatttttatttatggaaaatttcaaaaatagaatagtatagtgaatagtaaagtagagagaatatttaggaaaaagtagagagaatagaccctaatgtacccattgctgaggctgaggcctcccgagtagctgagattacaggtgcccactatcacgcctggctaatttttatatttttagtagagacagggtttcactatgttggctgggctggtctctaactcctgacctcaagtgatcttcctgccttggcttcccgaagtgttaggattacaggcatgagccaccgtgctcgacccttctcaattattttaaaggaaatttctgatattatatgataaatacttcgctatatatctctaaatgataaaagcttcctttaaaaaaacaatcacaatgccagtattacaccaaaaatttaaccatttcttaatgttattgcatgttcatttgaactcttgattttggaaagaaagatatgcacatataattgaatggttggctttttgtgttcattgccaccttttcagtgtgtagagagatttcttttttcttactttaatggccttgctattaactctccctgccttgaatcccagctttttgtgttgccattttgcccatttgcacctaagtctccagtaaagaaatcagaagttggagtgtttgttgaagtggttgggtgggtaaatttggatcatcttacaacttaaccaatttatgagttgctgttaaagtgctccaaatgatggccagttgcttgcattgtctacaagttagttattttatagcattgttggctaaaagattgtatttttttttttttttttttgagacagaatttcgctattgttgcccaggctggagtgcaatggtgtgatctcggctcaccgcaacctctgcctcctgggttcaggcgattcttccgcctcagcctcccaagtagctgggattacaggcatgcgccaccacgcctggctaattttgtatttttagtagagatggggtttctccatgttggtcaggctggtctggaactcctgacacctcaggtgatctgcccgtcttggcctcccagagtgctgggattacaggcatgagcccccacgtccagccaaaagattgtatttttaaaggtaagaagacttgccacataccaaatataagcatacttcttgcctttactaaaactgtttgacttgacttaatgctgcataaagcatggtgactcctgatctttctagcgttaatgcttctgtatgcttttgtctgcattttccttccagactatttcttttgtctacatagtgactgcagttgtgggagttgaggcctggtatgaacctttcctgtttaatttcttatatagagacctattcactgcaatgattattggtaagaagctccatgttgaagcctgttttaaccatcactttgttatcaaaagagccggtatttgactataacaagcaacaacaccctttgcctcacaaaacctccaggaagcagaacaaccctacaaccttgtaggatttcagcctaaccattaagaaaaataaggtttccctgtttttggggtttttttgttcagcatcagctatttctaatcagagggaaataccaaaatagatcacataagcctgataaagtgactattcaaattaacctaggctgtattggagggtccacatttggtacaggttttatatttatctcaaagttgaaaattactagtttgtatgaaatacaggacagatgaaatgtagagattattttataatgtatccactcaaaaaattaagcttctattcctctcagatatcctctttcttaacccactgattgctaaagattttttatggtggtaatctttctgttttgattttagctgaaggggatatctgtaggatgattgactgagtggagagggtattagtggtatggaacgagtgtaaagagaaatctagatggttatttaggggccccaggagtggcactgagaacctttgtagaagtaaaaaggtatatgtgtgggctatgtcctgtattctgttctcttatctaaaaaataggccacacacagtggctcatgcctgtaatcccagcactttgggaggccaaagtgggagaatctcttgagcccaggggtttgagaccagcttgggcaacatagtgaaaccctgtctctagaaaaaactaaagttaatcaggtgtggtgcgtgcacctgtaatgctagctacctgagaggctgaggtcagaggattaccggagcccagtgagctatgatcgcatgtgccactgcactccagcctgggtgacagagcgagaccctgtctcaaaaaaaaaaaaaaaaaagaataaataaaaaataaccctttcccatttggtgaaccttggtaatggaatgggaattaggtaaggcttagaaactgtttagaagatggtatattaggcactggctttcagaaaaggagtggtttgggcttttttctgtagctctagactgtgcatattttaggaactatcttgaaatctatcaaatgttcatttttgatacctgtataaactgttttttctttacctcaaaaatgctatttttcttctccaattatgtagtgacccttttgattgtcccatggcaggtttcctgcatgttacatttaagtgttaaatttagataagacagaatcctctggtatatgagacatattttttaatgttaagtgtgtactctaataggcacataattttctttataatgtttctacttttatataataaacccctgtgtactattacccagtctcaactattttcaataccagtgccaatcttgtttgaaatgcaccagtactctttagccccctgcttagcccccgggttgtgttataatatacagtttatttacttactgacatatttgccttatatttgacctaccatgtggtgttctttcccagaagtttgaaggacttcctttaggtttttttatagtgcaggtctggtagcagtttattctctctttttacttacgtgaaagtgtattgattttgcctgaattttttcttttggcattttgaatatatcattttaatgtcttttgacatccattgtttctgagtcagctcatatatcattgtcactctgtaatgtattatttttctcttgttgctttcaaggttctctttttatctttggctttcggaagtttgactgtgatgtacctaggtgtggttttctttgtgtttgtctttcttggtatttgttgagctgttgactctgttggacctgtaagtatttttgactgaatgtgtgaagttttcagtcacagtttcacttcttgagatattttttcttcccctctctcttcttttctgggaccccacttacatgtgtgttacacaggtttgcctgatactgtcctaaaagtaattttctatggctttattaagttttctttaatctctttattctttgtagtggataacttttattcatctgtctttaaattcattgctttttttttcttctgccatctccaatatgctgttgagcccatctaggaagtctttcatttaagttattgtacttttccctgggtgcggtggctcacacctgtagtcccagcactttgagaggctgaggtgggaggattgcttgaggccaggaagtcaagaccagcctgggtaacatagtgggatcacgtctctacaaaaaaatagaaaaattaagccaaatatggtggtgcatgcctgtagtcccagttacttgggaggctgaggcaggaggatcacttgagcccaggaagtcgaggctgcagtgagctgtaattgtgccactgtactccagcctgggcaacagagtcagaccctgtctcaaaaaaaaaaaagttattgtacttttcagctgtagaatttccatttggtttttaaactttctatttctctgttgagattcttctgttcattattatcatcatattttcctttagttctttgaacatatttaaaattgctgctttaaagtctgtctactgagtccaacatctgggcccacttaagagtcattttctgttgactgcttttttttctatttctttgcatacctagcaattttttttttgttgttgttgaaaactggatattatagattatatttgtggagactataatctgttctgctctgaggatttttggttttttgttctgataggcatttaacttgtttggacacagatgaagaaatttgtcccatcacattgtattaagtagctcttgtctctgtttggttattttcagcttttagctgctgcttttttagccaggtctcttgggggtctcctttgtgtctgtgtagtttagtggtcagccaaagatttgggcaaagtcgatactgagattttggcgctcacctctctatgatttttttgcttttggggtttccccatctgaatcttcggctgctcttccagcaattgtgttctgcccccaaccctcaagccagtaagggctctgccttcttcagcccagtctgagtgtgggttgggaacacacttagtaagagatacagcagactcacatctcaccaagaacacctctgtctttcaagcacagcatctcctctactttctgccttctctttcactatgttctgtggggtctccgatttgcttgcttagtttagcatccacccaggaatctgggcagagcatatactcagatttagaatctcaacccttctgcatctctctcttctacaatatcccccaccctgctttctagttcctctgctgctctgaatctattatctgcttccataagctggtaaggaagactgtggctttccatcatctggtctgggacagggggtaggcaagccacgaactcagagttgttccccagtgtttcaagtgtaaatgcttctcgaatttctgtctgtccttcagtattttctagtaccttcaagtagttgttttaaatatttttgtctggtttttaatcatcatttgtgagaagaattgtcctccctttttatgccatcattaacagatgccttccttcctttagattattttaaagcaaatcccagatatcatttcttttcatccgtaaatatttcactgtgtatctctaaatgataaggttttctgtaaaagaaccacaattgatgtatttctatagctgccgagtacctatacattgcctttggttggtatgccttttaaatttctgttaatctggctgggtgctgtggctcacacctataataccagaactttaggaggccaagacaggctgatcatctgagggcaggagtttgagaccagcctggccaatgtggtctctactaaaaatacaaaattagccgggtgtggtggcgtatgcctgtaatcccagctactcgggaggctgaggcaggagaatcgcttgaacctgggaggtggaggttgcagtgagtcaagattgcaccattgccagcctgggtgagaagagcgcaactctgtctctaaaataaataactaattaaaaaatttcttttaatctacgtagcttttccctattttttctttgaagtttatgtattgaagaaagtaggtcatttggccaatagaattcttagattctgcgttttcctggttgcggtctcatggcattaacatgttcctctgcccctcacttttcctataaacaatagttagatctgtgagcttattttgatacaggtttaattttgggggttggggggcatgctggggaacagtgttattaggtactggtcttcctattgcatcacattaggaggcatgtagcgggttcaggttttgtatgtctgttccatctgctgcaagtatatatatatatatattttaacctgctaccttaaactattaagggttaaacttcacctaataatattaacagacattgattaacatggcttaggaattcattcattcagtggataggtaaggaaatcaagtttttatgataaaatacttcataaatacatactgataattccaaagcaaatttggtagtacagaatttttacttaacctcattgatcttatatttttatctcctttaaactatgacaaaatccttggttttaagtgacacagaatactcatttgctttattccatgaactattcacaacagtctccgaatacagtacctaaatcagcaaacagaggaaaactgaaaattaagattttgtttttttgcagttttattcatccttacgtcttatcccactaggtgtgtcccgtcagtttactgtattttaaagtcaccactctgtggttatgccaccagttgtggatttatacatctaggtttatttgttttactttaagaattactttctcttttaaaattcatttttcctttataattatgtaaaatatttgtgataaagtcaaatttacagaatgaggtatattcaaagaagtctagcttctgttgttacccaatcctttctttcctcagaggtaaccattcttagtttttaattttatggcttatcttttcattgtttctttcttactataagtaaatatttgtgtttcattttatcactcactttcatagatacatggtagcattccattctatatgtactgtactatgtactgtgccttttttcctcccccctcttaattgtatatcccagcgatcactccacagtggtctataaggagcctcctcagtcctcttacagctgcctggcacttcattgtgtggatgtaccgtagtgtgtccaaccatccccctatcaatagacatttgggttagttccagtttttgctgttgtacaaattgctgcagtgaatagtcttgtacatcagtcttttcatattttttgccagggtgttgaggaagaggtccctagaagtagaattgctagtagaggacaaatgtgtgctgttttgcttaaaattaccatattcccctacatatgggttgtgtgattttctgttcctaccagcagtgtatgaaagtgcttgttaatttacagttttaccaacatagtatattgtcaaacgtttgactttttgccaatctgataggtaagaaatgatgtgtctgtacagttttaatttgcctttctcttactatgaatgagcttttctagtgtttaagagccgtttgtatgtccttttctgcatattttacatctctcaaacagatttttttttctatagggttgttggccatttcctttatttttagaagctattcatatattaggtatattaatcctttgatatagattatagttttccccattattgtttctctttttaacttttcttaaggtactttttgtcttggtggttttaactgaagtgtacctacttaataaataaactggaaatgtgaggaatgaaaatattttttatgaccatgctatccttggattgtatctccttcagtttggtctttttttttttttttttttttttttttttttacaaattctactccaatttttctctagctgttaagtttcctatattatgaagtctgggccttcacttgtgcaagatgaaaagcgggtctacatatatatggtctctatcactgttctctacttgaaacatagagcttcatagataagtatttaacaattaagtactcgtttcagaaagtacattaagtactataaagaagaaacagaagatgcagcgtttctctttggcagcctgtatagagctccggctttctacatgctcactatacttgagatagttatttcaagatttttaaaactaaaattactcttggtggcaaatcttttgctagtttgtctcagcctatttccaacacctcagagctacaagtaattctgcattaattcatttagccttggctcccctttggtgcttcccagcttgacgtggagtaagctgctaaaaatttctgagaacactgaggacctcaggtggtcttctccttcctttccctctaagttcgtctaatttggggaactttgttctacttgggcttggaagtagcagagtaattctttttagagataagatttctgttgggttctagtcttctgttttaagccagatgtcttaggaattgtttagaaggaatgttttctgcctttaatctttaaggccatagctgcattgaccctcaaaccaagtagagtcaccaggtgtctggaagagacaaactggggctaatatgttgcatgacaatggaacatccaaatgaagtgcccagcagcttgccagatatattgatttggagtttgagagagaaaataattaggaacttatatcactatagatcataggatcaaagaattttaaagatgtaagggacactagaaaatagttcaacccatccccattgtacaactggaatctgaagttcagattattagagtttgtccaagagtccataattagatattgcagtcatctgttgtaagcttgtagttgtgctttaagagggattctgagagagagagagtataagtacggtggggcacccaggtagtaatatgcaggaagtagaattggcaacaaaggacacagaatgaaatggtgagatggctagcggaaacatagggagaatggcatcacaaaggcaaagggaggaaagaatttcagtttagtggatagtcaaccaaggcatttcacttagcagtcaggaatgaaaaaacgatactgaatttgaacattaggaaagcttggtaaatttcaagagtataatttctgcaaagttggaacacagtgaataaaaaagtgctaagaaattgaggacaattgaaaagtttagcaaatgataagacaaagcagaagatagtagatagtgaggacagcagaatcaataggagggtttcttgggaaggccatctttgttttaaagtttatggggagagaaccagtgtgcgaatggaagtagctagggggagaaactgaaaatgctaggaagactgggtgtggtggctcatgcttgtagtctcagctgctcagaagcctgacgtaggagaattgcttgacccagtagttcgtgaccagcctggaatatagccagaccctgtttccataaaaaaaaaaaagctaggaaggtaaaaaataaatgtgaagcaacaggattccccctttgagtagctcatgcttactgtgcagtttcagtaccccatactgttctaggtatcttaacatgtcataactcattcacttctcaaagctctgtggggttggtacaactattatctctattttataaataaggaaactgaggcagtaaaacaccaatttgcctgaagtcccgtaatcagttcatggtacaactgaaattgaggcccagctggctttttgagtctgccctctgaatcaccaaattgtactgccactcttcctgttgtaaatgttgtttataaatgtatttaattttattacacaagtaaacttgaacctgaaatttttggggtctaaaaaaatttgttttgcatgattcagtggtaatgtaataattgctcttgaataagcataataattgaataattattccctttaggttgtgcattatgtgtgactcttccaatgagtttattaaactttttcaggtaagtattttattttttaaatgggcaagaaatatgaaaagttttagcagttgttagctgaacttagggatctattttccttttggagtcaggacattttgaaaaggtcacaaaacctatattttaaatctttaatggggtaggatagtttagggtgtcgatggtggctaatgtagtcatttcaaacacagcacaaaactactagttcttttgttacggttttggactcatcaaatagtcttctaatgaggccaggcgcggtggctcacacctgtaatcccaacactttgggaggccgaggtgggcggatcacgaggtcaggttcgagaccagcctgaccaacatggtgaaacccgtctctactaaaaataaaaaaattagctgtgtgtggtggcacatgcctgtaatgctagctactcaggaggctgaggcaggagaattgcttgaacctgggaggcggaggttgcagtgagtcgagatcgcgccactgcactccagccttggcaacagagcgagactctgtctcaaaaaaaaaaaattttagcaagatcataaaaattctgaatgtgtgtagtttaggaccaaactggacctgtgctgacttttcttaaatagcccttatatagaagttcctgtctgggttgcggggagaagggagatgctcaggtggagtttcatttctctgatctatgtgcttctccacttttgctcagccacactgaatttgcctattgtgtcctgaatatattttgctctttcccttcttagtaattttactcccactgcttcctttgctcctttttcttctggttgaaacattttcttacacttcccacttcatcctttagctctcaaatctgcgtagcagaatcttatttatgttaaaccaagcgctattaatcttcttcatttatttgagctggcagttatttatagaagccatacagtttaaagctctgaaggatgtagagattatttctctacattttcttctcattttataacaacgaggctctcattgggcaacatattgcccgaggtcgtgtgatcaatggcggaagcaggactggaatttggagctctgttcagctgagcaggcgtgtattgtataacctcctgtgtgcttagagacactgagatgtggtatgccagtcgcacctcagagtctttcattgtgagctgtcttactctaagttctctatcactttgtgtcaaagccgcactttgaggtactcttctagtattttatgttcatcttatttaccccattagaatatctcatagaacaaagtccagattttattcatctttatattcttagcacagcagttgatagtttggtttaaagagaaaaaaatgggattagaggtcagaagatttcagtcctaatcctggccctgccacttggtaccaagttttgtaaatttaaattctcttatcctcacttagcctgtctgtaaaatgggattaatgatgttggttctgtctatgccacaagattattgtgagtataaaataagtgtataaataaggaaactataaactacagtacaagtactgtacaatttatatgtaataatgttctttatattacttgatttttttttccagaagctataaaaataacaccttgaaactcaattcagtctatgaagctatggttcccttattttctccatgcttgctgttcattttgtctacagcgtggatcctttggtcaccttcagatattttagagctacatcctagagtattctactttatggttggaacagcttttgccaacagtacagtaagatttttttcttttaaaaatcataatatatattaggattgtatgacagaatttgataatttgaaaaatctttaatattagaataaacagattttaacttaaagatttttatttcagaaatttgaaagaatagtaacctcaaagactgaaatgctgaaaattattttattttgccctttgaaaccaataggattggagactacagtagtattttggaactatggcacacttaaattttttattttggttgcccgctgaagaattcatggaaaaaatttatagattccctttagactctaaatatattaccagtatggctaaaatagctgcagacttaaatgattattctaggaagcttggaagagatttttgagaaagagaaaacacacactttaaaaatcagctgattttaagattaagaacgtggaatttaaaactttgtaataaatagaacatattcttataaattcctttccatgctggactgtgcaagagagcagacaggaagcagagatcaggagttgagaaaagactctgatagtcctgaaagccagaaggtctgtgttctagctcaggctgggtccttagaagtttttattttgtaacttagctactcatcttatgtttccatgtttgtaacgtgtgtaatatctcaagtcttgctgattttatagggtttaaatatctaaaaacactaatgcattgtataaaaagtgtctctgaaagaattaaattatattcaagtaaggtcttcaaaaataaaggagccaaagaggttttgagatactaattatggcaatgggactgaattggagatagcacttcttcatcattgccataaagaaacttaattgtgtgggggtgtgggaggctattttgatttttttttttaacatatcgtagaatcttaaaattgagagaaatttcttttattcaaactgttgcccagtgggagaatgccttctatagcatccttattcagttatcttccagcctcttctgacacacactctgaggttacatgggtttttgggcagggccaggggtccagttgggcccctaagcattgagaacttctgaacttagataatgtaagtgtgttggttcaggtacttgaatgcttttcaaatgttggaaagactagttttggaagtgctttgctaatgaaatttttctttttttctctcttatttttttaaattgacgtccagtgtcagctgattgtttgccaaatgagtagtacccggtgtccaactttgaattggttgctggttcctctcttcttggttgtcttagtggtaaacctaggagtagcctcttacgttgagagcattctcctgtatacattaacaactgcttttactctggcccacatccattatggagtacgagtggtgagtaatctacagcaaaatgggttcaatttggggcttataaatggcaccaataaatgcctccgagtagaaaggaggcaatggaaaattttaaaaagaaagttgcttattatagtagctgtaagggttttgggatattctctaaattttggataatatccagatgtttaatttcagatattgtttctctaatgagtatgttactgtaataacaaatgattttaaagctggataattattgtgaggaattagttattactgtaagtgggtatgtataagccatcttcttggtgagtagaattgtaaactgagcctttagttatatgggatcagataatcacatttgttaattatctatttcttcacttgcttctttagctttaggggcatttttattgttcattaacaaaatttggaaagaaatgtaattggttgtgtagtgctttttccctcccactgcccagtttgctaagcagttgtggtgagggagattagaatttctgactgaaggaagactttggcattatttgaggttttacttcatttatgttattctcgagccctcatcagcaaaattgataaataaggggaaatatagaagaaaagggattttgagaaatgttttgtaaacttgatattttcttctaaaataaactaattttaggagaatggacgaatatagatataatgaaatcaaatggaaccatgtggtttttctttcactttaacattcttttctaattattttacatttttaacataggctgtgcaatattccaccaaggagattacttaataatgaccttgcacagtacagttattttaatcatttaggttgtttccagattttcaccattataaatattgccctaggctgggtgtggtggctcatgcctgtaatcctagccctttgagaggctgaggcgggtggatcgctttagctcaggagttcgagaccaccctgggtaacagtgtgaaaccctgtctctacaaaaaatacaaaaaaaaaattagccagatgtggtggtacaggcctgtagtcctagctacttggagggctgaggtgggaggatcgctggagcccaggaggtcggggctacagtgagctgagatggtgccactgtgctccagcctgagtgacaaagtgagaccctgtctcaaaaaaaaaaaaaaaaaagaaaaagaaagaaaaaaaatgttggcataaacaatctcgaatatttttgtttcatttgttttattttccgaggataatttcataggaatggggttgtgacagggtattcacatttttatgactcttaaaacacttctatttggtatgcttgtttgaaaggaaccctgctgttaatccgtttgagaaacaaaatatcttctgtattttcacacacagtttttaagtgggagaggcagctatcatgcttgataacaactttataccttgcatatgttgctaaacttgggctttcttcccttagtgtttctctacaaagttgccctcatttgttagaacaaactagatacaattgttaaggagaaaaaagctgtgatgaattgtgatataagacataattatttttgtttttatttgtacaaatgtaaccttatataccttatatcaatactcttcggcctttatcctgatatttcatcaatatatgcatggcatagaatatccatttgccagtgtcttttttaattgttttcatttactatagccttttagaagcatatctttagaaagctacatacataccaaaccaaaccaaaatatacttttctttaaatgataaaggtactacattttcattgttaaaaacctggaaaataaataacacgctaactggaaaacaatttaggatcatcttttttatctgtctttgtgttcttttaccacatctacaacttctggccagaagttaaaacttgctaggccacacaaaacattcacttgaactgctgaaatgtaaataataagtatcaagtaaatgacatgcactcgctgacctataactaagctcttgccttcccactagagataccctaactaataaggcctctccaaattcatagatctagttttgtactatttcatcgggattaggaatgattacttagaaatgtttagcaagctgaatatagagtctaactataaatatgattacttgatctagatgctacaggtcaactaatcctatagtttttcagatttggatgtgaatttgagtgctctggagggttctcaagactagattttagttctaagtcctaactttcccatgttagttctagtacttccatttagctgtctagttctatagctatcctaatccagaaaaaccttttcagtatttctcatgatttttgccgtgtcaataaattgttatctctagggggtaaattctgtgtgcttttaaaaaacaataaggtacatatttgtcactgtctcatgttctgatttttcataggtaaagcagctgagcagccattttcagatttaccccttctcattgaggaaaccaaactcagattgactaggaatggaagaaaagaatattggcctgtaataatctttctttgggcacaaagaagtactgtaaataaatgcttgtaaatatttcctccatcaccattgaactagactgatctgcttgacagacgtgggatctcagtatggtacttggacagcaggaatgatacatataatctgaacttgggaaattttggacctactaactctaagcctattttattttttataaaactatgtgacattttggttgagcagaatgtacgttagaccagcaaaatgttcctaatggttctaacttcgtgagtttacaatgttgtgattcatgcagggttaaagatgctttgtttttattttttaagtaccaaaattggtttcagaacactgataacactcagaaaaccacagtgtgttttcatatttggaactttgtaatagcgggagtagcagtagtccaaacctagtatagggaaaggataaaaataagtcaccttcaccaagagatgccaatgattaccaaacaacagacagttgccaaatactggtttctctttcccctgaaaatggcttttgttctcaaatgataagagagctaatacatttagctaatattctagctctctttattatggaacagatcttgatagatggtttaattttctcctaaagagaaataatcagttgagaatttgagaatgggttgtaattatcgctcacccattgggatggttcattgtttaaatatggcattttccccccttcagctgcaggttcctgagatttggtgcctgtgagctctgattgtaggaatgcatgtgacagtcccagtcctatggtaatgacttaggaggaatgcagataaaagtaccttgtaagataaatataaattggagttaggaatttcatgaacctcactatgaccaaaattaattttttgattcagtttgtctgtctgtctgtccttcccctctcttcttttttcagggtgaggtgctgtgtttcttatttcatacgagataaaacagagagaagttctctcttctccagcttgtccatttccccacttgaagaaaacttttgatatatatgccttactgagtacatgccccctttaatgttaacatgacttggagtaatttctgaggtttactgacaaacataaaaatccctttaattgtagtgtagttgttctataaaccatattttttcatgatgtggatattttcttctatttctttgtcttcatttaatttggtggtggtgaactttacttgctgattttcttttatttttcactgaatgaagtttgtgcttgaatgaagagtgtatcttaaaccccctttttttggacaggctgcacttggataaaataggcaccactgtgttgatatgtaattaaattcataactatttatgaatgtgaccattgttaaatttaattatagtgtatttctttcttgaatttcagtctgctgctttgtaaaaaataactgtaattgatatttcatttttaaaatttataaattccaatcattgtcattcaagttattagaaatgagtcacggcactaactcatggttctatactcattttaagaaattgtaaaggttgaggtgtatttggtgactttctctgagacacagatgaacgttggaaatagatgagaaatggatgcagaataatgcagatagtgatcccatgtttgttaattgccatcatggaagtcagagaattaaccaattaagtgacggtaactattttttgtataccttgttctttgtgatctataaaattaaactggataaaatgttaattgggggtagggaaaaagctttgttttaagatttctaagctaattattttaccgttttgttgaccttgtacacaagaatgagattaatctgtattatataagaaaagaactgataaatatttataaaatgacaaacttggaccacaggctttcttgaccttgtacagtatagtaaaaataccctttacttctgacattttaaggtcacgtcctatagtttgggggcccttttacttcaaaggtgtgtttctgccctcttttggttgtatcaaatttatttgaaaattgttttgtgctgtactttatgacttgtttccctatggtggtaaagaatgatgccatagtcagttttattgacattgttagatgaaagaaaagtagctgtcaacaaggggaaagtgaaattgagcaattcactgtttcaggatacttgaggatctttagtgtactgctgactctttttcttgttttgtctgccattcttgaaagtgcatcttgagagcccccatttgttgtgtagagatatagcagctgaagcaggacttcattccagatagctgtgtgcatttatgtcatgccaattactataacatttccaaagtatgaaaggtctttcaggcttatgcatgatattgtgggtgacttcatgccccagcctttctccccagcatacagtgagctgccttttggggagcaatgccatgataaggagcatacgtgcatgttttccgtactttcagaatagagtgccttagctaggccagaggctcgtattgtgtttctgctgaccaaagttgcatacacctgtaagaagtgtctttttaggttatggtattaaaaaagtcgtttcaggcttatcagataataattctcctatatttgaggggggcatgggataaaaagatttaataatacctggatagagaatgctaatgctgccttttgtgatcctttaatattatccatgcttttataaagtgcagtacacattttgacattgccacagtttacagtgtcattcttccacgaataggtaattgatagagtttatgggtcttagtcttaagggtaacagagtgaataccttccaaataaaaagctaaatattcctccttgtcattttaatgtcattattgaaatacttttaattctaattttcaaaagaaagctaaatgctgattgtggtttaggatgttacagtactaataccatcatgttatttattctaatatagaggcattgagaggaggggagtgtatgtctagagttaccccaattctaaataggtaccaaaagagtattgattatgacctggagcctgagctttgggagaatatacaaaggaaaaagcaggcatagtttccactttaaagggaagaagggactttaacatcctatgaatttgaaacatcctatgaatttgaaagtttcctaagtgttgttttcaaagaactggtttattttatagtcagtcaaaatgcatttggaatgtaccttgcttccataacagactttgactctatgacctatgaagaataaaaagataatctgaaggtgtttgagtcagaggctacttttcccctttatattttatatagaagcctatttgtaattcttcctcttcgttcttcacctgggtttcctcttatctacccaccacctaggacagaggctgcccactcaggtcttgccttgttgcccctagatgttgccacattcacatctccttgatggccttagatctcttgactagtcaaggactgggaacgtgccagggggaacaaagtaagcttgatgggctggaacttttgactttgggtccccaaacagccaaaaacagatacagaaatctttggttgtgtggatgcctgtgttcagagtggccttatcttgacctcagttctggatttaagtactctatagaaaatttgtgaagtcagaccagaattttctttgtcccatgaggtgtctttgtaagtcagcatgctcttgcttgaacaccctgtgggtgaataactttagtaagttagctgccagcattagaaccttccaggaagaattttaactagtatgctacatttgaagcactctgacatgtacatttaaagtgacagttttaaaagtaaaatggtgttaaatctctgaaacttgaacgtatgatgctctggacattttaggaagcttaagtaaatttctgattttcctttattgattatgtaacccacgtgatttgcatattttagtttttatgtttgacagtggtacaaatgactgacattggcaggcagttattgtagggtatatggttaatcacgattgtctaacttttccagagaaagtggtgatatgcttcttccttgcatggagctgtgggaattggatttgttggctcttcatttccagtgtttctacagtgcagaataaatgtaactttttaagcctgcatgctagtaatatgctttgctctttagtaaacaaatatgcaatagatagtaatctatctactttttttaaagcagggatctgctccctatctagacagatcttttaatgcattaatatttagagtagcaaaagaagttttgccatttgtagctctctcacaggtagcttaagcgagggggttgtgttgcatgtgcttagaaaggccaggatcccagaattggaaggtgccacatatacttttagaatattttaacaaaggcttgtctctaggaaaatccacttggactgcagcaggattgttctggtcttccacagaccattcacatggtctttctctccagagaatcattcttagaaagccaggctaaatcagagtagtgctgtttttaaagcaagtatattggatgatggctatagggtaccttaatgctgtgttgaaattggaagcagactgctcttcagcagcacatatactgcaactgaagttagagacagtactgaagacgagggagtagctaaatgctgtggatatttcatgtctgtttggctaatgtcttctcttgaggagtttctatgggtagcaattaaaattagaatttattttaaggtttttattaaaatatatacaatttgccataaattctagattctgatattcttgacaagcactttttgaatatctcaagagtaagttcttgacctggaacatatatagttagtacttgatgtcactaaccaagttgtagaaggagcctgttataattctgcaagatctgtgaatagcattataaatctggggcaggtgcctgtaatcccagcactttgggaagccaaggcaggtggattgcttgagcccaggagttcgacaccaacctgagcaacatggcgaaaccccgtctgtaataaaaatacaaaaaaattagctgggcatggtggcatgtgcctgtaatcccagttactggggaggctgaggcaggagaatcacttgaacctgggagatggagattgcagtgagcagagattgtgccactgcactccagccagagtgacagagcaagactccatctcaaaaaataataataaaaataaacaaatctgtttaaattactgttgcctttcagcattagactttgagtttaataactacaaattgagactgctcacaatattaactttttttgtaggttattttgttgtttagataacttgcctccctagaggagcattcaggagataaagacctagctacatgtaatgatatgatcatttcaaaaatgtgccaagaaagcaaaattcattattgaactctaaatttctgggtgtttttttttttaaagtagcattttctctgggtaaagggaaaggcaatgaatgattgccaacatgtaaactccctgctgcccgccttcccccagtcccctccatctaacataatacagtaaatttgtagccagttgtagaaaaagaaattgatatctttctgagtaaggtttcatgccctgtgactaagaataggtggaggaatcatggccaaatcaaatatgaattgtttagcttggtcctgttgcagttggctttctgtagtgttctgaaacaagaggacgattccattccttctcaggaacctagaaacaacaccgcttgagcaactggaatatgtttgctgcaagcagaatattttggggagaggaagagtagtttaattcaagtagtttaattgaacatattagtcattggtctgtctgggacgtgcagtgttcatagtagcaatgtatgtaccatttattttatctggttgtgtgtgatgtgtgtgtatgcctatttaatatgtacacatatattcactacatatgtatgtatgatatattcatatatacatgcagtctgcttgattatcagcaaaatggtcagcctttatcagatagtttcttcatgtggagttcatctgcatgtggcccttactctgaagcctcttcctgatctggagccacagtctgtctgtcttccagttcatctcagtcctcgagaaaggccctttaaatatgtcactttcccattttcctttaaccatgggttgtgtgagccagaaagagctttgagaaagatggctgcttccaccagggtggaggcttctaggtctgcatgatgatggggcccgtttctggccagagggtggctctgggagcagttgtgctgcgggcttgctgggggagaactctaactgttgcagaaacagagcttcatggcttgcttaaattacttagctggaatattttaaagtgtcagataatgtgatgtacaaagagagtatgccgatgcatttcattgtttttgcattatctgtatcagtgtttcccattgctagcccgaataatcaagaccagactgtttcttgtcactggattctggaagccttgccctttcaactggatttatgtttgtttctgctgctgtgaaaccccaaagtaatgcagtaggttttaattgaaaattgtttaattctattattgataattatttattgtaataaaagtaaaagagtaatttttaaatccttttaa

SEQ ID NO: 8 - DNA, 71685 bp, Homo sapiens
ttgattcgacgcaatttaaaatgataacataataatgtattttgggggaagaactattatttaaagcctgtggatttcaatttctcattatatattacagctatctataattataattccacgctgccagctgggaaacaaacaaaacgacaacttctagggtggaataaaaaggaagatggaaggcagtttaggtcatcagcgcctacttcttaccagaaatcacctggagcctccattaaaccatactcccgaacttaccacacagctctaattaagtctagagtggggcatagttttagtttcaacaggtgctttatgtgactctgatagcaatgggcctgcagacagttctaaggttgagtgacgtgaaccaggaagcaaaaagacccgaattaaagctataacagcagaaataacgtaagagggcagattccagccatatctgcaagatagaatgaagagggcttagtgatttattggatatgaaagatgaggaagaatctaaaggcaaatgagataatagttgtgccattaaaaagagtctattaagaattcagaaataccagagcttttttaagacgggggttgagaggtaagtcctgttacaatgattacttcaacaccgattaaagtgaatttgagggtgcttatgtgacatttagaagaactgcccagaaagcattcacaaatacagtctagaattcaaacacgacgtccaggacatggagacacgggttaggaaatcactggtatcttagtggtaggtaaatcctagagaacgaattctttgaaaaaagccaaaaattactcatttgaattttgcaaactacagtttcgccgggcttcttagcgacaactgcagctaagtgtcggggacagaagagagactgaagtggccccgcaagccccctttggcaaagcccactccgagaccatccggatcccgacctacaccagagcaaatgtctaatggtgagaagccgcttcaccaccctacagatccgcggtgcagagatttccctgctaaggtcctaactcctgaatgggtacggcgagtacacccgaagaatcgaaaggtacttatcccccactcagttctagaggaagcagcgaggtgggccaagatgcgtggtaaggcccagggactctttgtcaacgaagtccgttaaactttccgccctcccgggggcctcagcgggccaattccactcacttctcggaggctccggcccagcatggtcctcgtgcccagcctgccaccacaggagccaggcaagggggaaaaagaggtcaccggtcgctagtgatgttacatgggcgcagccatctttaattgtcactgagcccttcaacaccgagtacttggattggttgaattgcagcccgaggaaatgatctttgtaggcgattggttggcgccgcaaagccatcccggcggctaaggagagcgggcaggcaaggagattccgggccagggtcgcggcggcagtcggcaagcgttcgattctctggcgttggatcgcgagcggtgtctgcttgtcccgccgagggctcccaggacagggcagggatctagggggtttgcgcacctgctttttaatgccccgcccccccttttttttttaaagtggagggggtgaaagtgagggaggagaatggacagaatactgactggaacgttaattcgagcatttcatatgcgaagagcggaataacagttccgtattcttctttcagtttctccattagattagcttcattttcgaatgctccgttttgcatgcttaattttgaaactagcccgtggtttggcagaatttgactgaattcaggggtgagagtttgatccagtccaagtgtatttgaatttgagcacgcagttcaaccagtgtttacaatggaatttctgaagacttgtgtacttagaagaaatgcatgcactgcggtttgcttctggagaagcaaagttgtccaaaagccttcagttagaaggattagtactacctctcctaggagcactgtcatgcctgcttgggtgatagataaatatgggaagaatgaagtgcttcgattcactcagaacatgatgatgcctatcatacactatccaaatgaagtcattgtcaaagttcacgctgccagtgtaaatcctatagacgttaatatgagaagtaagttttcaaaagacattgttaccttttttaaaaaaatcactttcataaggtatgccgttttaaaaaattgactacgcttctttggtttacataaatgaatcatttaggtttttaacaatacctctgcaaatatttccaaaatttttgaaattgcaatggccagggaatccttctggccatttgtattgacaaaatataagcttgattgttttcatgcgtccttaaatatgtaagttcagacttgagaactgtgtctgtagctaacttttttttttttgagactgagtctcactctgtcacccaggctagagtgcggtggcctgatctcagctcactgcaacctccgcatcctgggttcaagcaatttctcctgcctcagcctcccgagtagctgggattacaggcgcatgccaccacaccgggctaattttttgtatttttagtagagatggggtttcactatgttggtcaggctggtctcgaactcctgacctcaggcgatcctctgcctccgccccctaagtgctgggattacagacgagccattgcgccctgcctatgtttgtagctaaatttctgtccagggaactttgtggtattctgagatccgtcacaggcttcggaagtatagttgtttcctagtcagtttagaatttatggggttttttgtttgtttttgagacagagtctcactctatcggcaggctggagtgcaagggcgctttcctggctcactgcaacctccgccttccgggttcaagcgattctcctgcttcagcctcccaagtagctgggactacagacatgcgccgccacacccagctaatttttgtatttttatagaaacgggagtttcactgtgttggtgggaggctgaggcaggagaatcgcttgaatccggaaggcggaggttgcagtgagccaagaacgcgcccttgcactccagcctgccgatagagtgagactccatctcaaaaaaaaaaaaaaaaaaaaaaaaaaaagcattgaaatgactttactgtgattgtctcatgaagtctacgtttgtattctttgttttgaagtagtaattgctactaccagttgggcatgccgttttcctttattctttttatattaggcttgaagagaattcagttttttataagatatgtcttttagtggtaagttttactcaatgatcagcatgttttttcatctcctttgattgtaagttctttcaagattgatcccatgctttgtcaacctgtttcagtgcttcacatacgcagttgtcattcagtcactatttctatgcctttttatatttttgttctgacttaagataacaaacttaaattagcagtattttatctatgagtaatttttacattttgtcttcgtttaggtctgttagctttttatttctttaaatgcacatgcgtaattcatgccgtgtacattttcatttaaacagaatggctgtatctagacttttcttggctgctgtttaataatataacactgtaaaacattttacttttatatagtattcttgaaacatcttagttttttatgacttgaatgggtaatattattcgcaagttatcctctttttttttttctcctaccttttgaggatatttattgtcattgcagaagatatctgaaacagtagcttggggaaataaaataatgagtagaagactgtaaactgtaggaagcagttatttcccttggcaagaaagcaagagacatgtctattttatttgaaagatgaaggctggctgtttttctggagacggccactactgttggacgtaaaataataaatcatagaaatggctaaagaaatgaagaatttttacatggggaaaaaatgcagccaacagcatcataccaacaaagtttggtgtctttagatgggattaaagtctttaaactgatgacagatttaggatttttcaaattggcccaactctctgaacaagtcaaggtgtcaacccctgtcaataggatggaacacttaagggccccattcagtcatccgtgtcaccaaacaggttctcaattactaactgccagctgactacattctgggttcaggggcttgttagatagtaacagtgagccaaggctactcagttgatgtattagcattatcaggggaccaagaaaactaaaaacaaccttgggctgcaggctctgtatctcaaagaggactgaaacctttctgcagctcttaaacagcagctaaagtttgacacgactaaatgtccacttctgttgttcaaaccacatagaagtttcagtgaataattgtttaattatctttagcagtggaaaaggaatgtaaggcaggaaaagtgaagcacatgacttttgtgaatattacaagtgaagttgttttttttttccctgacagagtataatcctgactccccagatggcaaatgttgtaatgttggtataatggccatcagcttagattttctgggactttcccacctttcaaacactttatcccatgtgtcttgattttttattagtaacacaactcatgcaagctacccacctgtcagcatctctctcggtatcttctaccttccctcctgctgtatggattagctgtcactgctttcacataaggccagccctcggcttgtgtttctgatcccatccccctcacctactctgggatatcattccggcaggtgtctcctgcatcatcagtcttttcttttctactggatcatctccattagtatacagacttgctgttatttctcctttcttaagaagaaggaaaaggctgggcacagtggctcacacctgtaattccagcactttgggaggccgaggcaggtggatcacctgagatcaggagttcgagaccatcctgatcaacatggagaaaccccgtctctactaaaaattagccaggcgtggtggcgcatgcctgtaatcccagctactcaggaggctgagacagcagaatcgcttgaacccgggaggcggaagttgcagtgagccgagatcacgccattgcactccagcctgggcaacagagcaagactctgtctcaaaaaaaaaaaaaaaaaaaagaaaaaaaagaaaaaagccactcaaaagtcctctgtccatcccagttcccacttcgagctactgctccatttctctgctccctttgcaacaaaactgttttaaagagagttcagtcttctcatgtctccagtcccttatttcccattctctcaaaagtgcactacacagcagttgctcctggcagggttaccaaaggtctgttagatccaggcttgtttgtttgttttaaagcctcttagcatctttggaccttatttgaaaacctgtctcccgtcagcagcattgaatgtctttaaactgccgccttagtctcctttgctgctttctcctcatccctaagatctaatggattgcccacaggagtgggtgcggggcaaggggagacgtacagagtgggttagtgactgtggagcatgcgttgtggggcagggagtgagtggtacatgacactggagaggtaggcagggtgcctatcatggaaagcctcacatggcagacaggttctcaaaaaaaggtcaagcagaagagagaataacagatacttttgggtctgagaaaagtcacgttgtatatggaagccatgtaataaattactctggattattatagagtagcaaatttacttgaaccaaaaaattaaaagaatgttttcagttttatttagctgatatttatataagtattctttttctttttctttttctttttcttttttttttttttttgagacagagctttgctttgtcacctgggctggagtgcagtggtgtgatcatggctcactgcagtctcaaactcctgggctcaagcaatcctcctgcctcagcctcctgagtagctgggattacaggcatgtaccactatgcctggctaatttttaaaatttttagtagagatgagctctaggctggttttgaactcctgaactcaagcaatcctcccaccttggtctcccaaagtcctgggattacagatgtgagccaccacacctggcctgtaaatagtcttaaaaataaaaagatatgggccaggtgtggtggctcacgcctgtaatcccagcactttgggaggcaaggtgggtggatcgcttgagcctaggagtttgagaccagcctggccaacatgatgaatccctgtttctacaaaattagccagacgtggcgcacacctgtaatcccaactactccagaggttgaggcatgagaatggcttgaacccaggaagtggaggttgtagtgagccaagatcacatcactgcatttgggcaacagagtgaggcttcatctcttaaaaaaataaataaaataggccgggtgcagtggcttacacctgtaatcccagcactttgggaggccgaggcgggcggatcacgaggtagggagattgagaccatcttggccaacatggtgaaatcccatctctactaaaaatacaaaaattaggtggctgtggtggtgtgtgcctgtagtcccagctactcgggaggctgaggcaggagaatcacttgaaccctggaggcagaggttgcaatgagccaagatcatgccactgcactccagcctcatgacagagcgagaccctgtctcaaaaaaataaataaaaagatgtgaaataaaacaacttgattttacacatcagaacagatgcagccaagaggctttttatcactcaggaatttattccaatttatttcaaagatgttgttctagaaacatgtttaaggatgtggggatcattactggtaaactgttgtcagcatcaagtactttatattcttgccttatttatatattgacttcaaacagcttaaacatttgtcttcaccagacctggcaccaaatattctgttgtttaaaaagtttgtgaatgagtacgttaataaagacatgaatacgttaataaagacatcatcttcaaagaacaaagcaaaactgtataaaagataatactaaaagttctgaagacagtttcaaaatttgaatttcaaaaatattttgaacaatggtggctttagtttaataagtgattatcactttccaagtaaattttttttaaagaaaatctttttatgctttcccatgtaatggcaaaaaattataaggttgattacttttttaaaaaacttttaagttgagaggtacaagtgcaggtttgttacataggtgagcttgtgtcatgggggtttgttctacagagtatttcatctcccaagtattaagtctcatacccactagttatttttcttgatcctcttcctcttcccaccctccaccctctgaaaaaccccagtgtgtgttgttcccctctatgtgtccatgtgttctcatcatttagctcccactttagttttctgttcctgtgttaatttgctaaggataatggcccccagttccatccatatccttggaaaggacatgatctcgttcctttttatggctgcatagtattccatggtgtgtatgtaccacagtttttttatccagtctatcattgatgggtagttaggttgagtccatgtctttgctgttgtgaatagtgttgcagtgaacatacacttatgtgtctttgtaatggaatgatttataatctacatcttgaagacctaaaattgtactggactataaccctgtagtagttttaaaagcatttcatacttacatttggaggaaacagataaattgtattttacaggtggttatggagctacagctttaaatatgaagcgtgatcctttacacgtgaaaatcaaaggagaagaatttcctctgactctgggtcgggatgtctctggcgtggtgatggaatgtgggcttgatgtgaaatacttcaagcctggagatgaggtgagttagggaatgccactattcctgcggggatccaacccacagaccctgatccagcgacggatgagagacgcacactgacacagatactttgcctgtcagtgcagctaaggggcttctgctccctgaatctgcagcatctgccccctaaactgacaaagtttgcatttatttagtacagattaaatgacgtaggtctcgagtaaacaccactagagggtaattaacattgccgaccgtgccctgcctctgcagcagtagagagcaatcatgcatccatgaaagatcaaagattggtcttaggaccacttgagtaaacaaactatttagataaactcccccacattccctagttatttgctctattgctatcaactcaaggtaaagagaattaggctgctttcagccaaatgttttactaaagctgtgcaacacccccggccttccaagtaggtttgtgtctacttcctataactatctttataatttttcctcttacaatttttcccaccaccctgactgaactcccacatattcctttactaaatgtgcaaatttcattctgtttcagaagtatattctatgctgttgaacttttttcttcttttcaacaaatatactgagctttgactagaaccatcacttttttggttctgttgttacattttttcacaaacaattccaaaatatcttgactgtacctgagtttgtgttttctaagtttagtacttaagaaatgcaagactttaaaatatatagaattagggtattttttttttccttgaaagggcctttaaatgacaatttctgccttatggatgagatggctttaaaatagcttaagtttggtataatcacctgtcacttgtcactttgaacttttgtaccaagaaatgatagttcataatcatagctaacactgttctggttgctttttataaaataagtcatctaatccctctgaggtagataaagttaggcccagtttacagatgaggaagccaagctataaagaggtctcatagctaataagtggtggagccaggactcagaccccagagattgtggtcttattgggactcgaagtagtcagtaaatgcagcaggatatgctggcatctgcttccagcgtggtttgacttgataaatctagaatcatactaagtaataaatttatatcatgaaaataacactcctgcttggtgtagtgctgacttctgtgtttttcacagcacagggtatatattagggaacactttcttgcttagcttcggtcaaaaaatatctgtgtttctaatgaagctgtctgtctgtgtgtgtttcaggtctgggctgcagttcctccttggaaacaaggcactctttcagagtttgttgtagtcagtgggaatgaggtaacttaccaactctgctgaaatgcattagaaagtttaaacaaagactggcaaatatctgaaataactggtgtttttcagatctagtttatgtttgatggggcagtttataaaaagataatatagaatataggaatttttgagagattaaaaaagtatttgatgccattcagtaacactgcctgctaacgtagctgtttttctctcatagagcagggatttggaatgagacctagaaccctgctgtgttgcttggttttaccctagataaatagttgaaaacagatataggcagtagagaggatggattagtcatcagtggagacatggaaatatccagcggttttgaataactttaaaaacaggagtctaatcaaatacagtcaggagaccaacaaattgaatagagagaaaggggttaacattgaggaaattggctacagaagggagggcaggaagggggaaaaggttattactgagattagagaaaacctagaaagatttcctttccagaaaatgagagtaaaggaaacagctgatctcaaaaactaattaggacgtgtttttgagagttcaaggtttatttggatttacttcacgactaatgggaatattgatgtggtctttttataaacaatgaagtagttatatctgataatgtagcctacataacattactgaacatctgtgaggcaggtagagctattctatacaatatttattaggataatcttggagtagggtatgcatattgcttaccctactccaagatatgcaacagatagagctatgcaatatttattaaggataatcttggagtaagatatgcaacaaacatgaactggaatgattttatagatttatctgtgaaaatacagttgacccctgaacaatgcaggagttggtgcacctacccctgtgaggtagaaaatgcacctacatcttttgactcccctaaaacttaactgctaatagcctactgttgcccagaagccttaccgataacataaaaagccaactaaggctgggtgcagtggctcacacctgtaatcccagcattttgggaggccgaggtgcgtggatcacaaggtcaggagttcgagaccagcctggccaatatggtaaaaccctgtctctgctaaaaatacaaaaattagccgggcatggtgttgggcgcctgtagtcccagctacttgggaggctgaggcaggagaatcgcttaaacctgggaggcggaggttgcagtgagcagaggttgcagtgagctgagattgcatcactgcactccagcctgggtgacagagcaagactccatctcaaaaaagtcaactaacacatattttatatgttatgtatattatatactgtattcttagaataaaggaagctagaatatgttatgtatattatatactgtattcttataataagggaagctagaatatgttatgtatattatatactgtatccttacaataaaggaagctagaaaaaatgttattaagaaaatcataggccaggcgcggtggcttacgcctgtaatcccagcactttgggaggccgaggcgggcggatcacgaggtcaggagatcgagaccatcttggctaacacggtgaaaccctgtctctactgaaaatacaaaaaattagctgggcgcagtggcgggcgcctgtagtcccagctactcaggaggctgaggcaggagaatggtgtgaacccgggaggcggagcttgcagtgagccgagatcacgccactgcagtccagcctgggcgacagagcaagtctccgtctcaaaaaaaaaaaaaaaaaaaaaaatgaagaaaagtatacttactattcattaagtggatcatcataaagattttcatccttgttgtgttcaagttactagaaagaggaggagtaggaagaagaagggttggttttgctggtctcagaggtggcagaggcaggaaatccacgtataagtggacttgcacaattcaaacccctgttgttcaagggtcagctggattcctgtgaaggtaaatgtgcttaattgtgttcataggtttgcaagtcattgcttatttttgactgttgtcttcaaatgtaggtctctcacaaacccaaatcactcactcatactcaagctgcctctttgccatatgtggctctcacagcctggtctgctataaacaaagttggtggcctgaatgacaagaattgcacaggaaaacggtaagtgtatcagtcagtggcagcatctaaacctcttttctttccttctgtgagttccttgcagtagatttgtcagagctttgaaatttagtatcatttacacgaacagagctgtactaacatttgaaaacaatttccaaagcattctatttgtgtcagtttgcactttcttagcttcattctgtggattctcagcccaatcacttgggaattttttaactgagatgtgtggatggaatggactttaggagtcagaaccttctaaaataatgcaaaatattatatgtgattctctaggaagaagatccatatcttttttttaatgaaattcctaaaaaggttaagaatcatcccatacagtttctaaagaatgatgtcaaggttaagatgttttttccctacctctcccaggagttattctcacacttgcatatttctataaagggactgcacaactattgaatattcttaagttctctcagtctcaatgcctaatatccattaggtcaattctgattccccaatgccttgagcgtgtactcatttgggttagcagcaacatggtgaccagaaatgtctcagatgtacttgagtttatatgtagattctgttgctttccagttgggtgacccactcactcactttttaatgagttttgttttgaaggttaaatgaggtaatgcacattaaactggtgacacagtttatggcacgtgggaggcactcagtaaatggtggctactgttgttagcaaggaggttgtggtgttccttgtattttagaaagttgccatcatagagaaaactgatgattttgttttttgttgagaaaactagatactaagaaccgtttaacaattgtaaggaaggaaggagctgtaggtcaaactataataaattaaaataacctagttttttttattactaaggattgtgttggtaacataactgaagtctgtgtgattctgttctattgttatgaaacattgcactttacatttaatgtgttcggtgatagagcattaaattttatgaaagtttaatagctgtatttttgaaaacttatgaaagctatacatctagtgaggtactacccttccttatcttagaattcaaggtaaatatttattctaaaggtcaaccctgtttactttttaagctattgtggcttatctttcttgaagttgccattttggtcaacactttgtttaaattaaattagttttgaccacatagatttttctaatggtttctcttagttaataaccttgcaaaaaccttattgaagatttttagacctgtattgtaattgtagactctgcaacagcattggttttattgttttgttttttcctttaaaaacattatgttttctatgcctgcatgactatatgtgcactattgttagagagctctcatttcttttactggttcagggctctgtggacttacttttaatatactgtaaaaaacaatttagaagataagaaaaaatttaaaaatttagagacaaagatctgtctcttcttagagacattggtgtgagtcctcagtttgttgttggctttgtgggtaattctttggtactctgttatcttctgtttaagcaacaatggcctggaactgggaagttggagccctgggtcctgttctgccattaactaaccaggtgaccacatgctatatatttatggtctctttgtggtttcctctgagtttatgagtataggacagtgtaggttttgaggagagctttgagaaatggaaagttttagaccttattaggtgatgatatcttgtattgagttgggtctgtttattgatttagccaatgttaaccaatctagagtgaaacccattgcaaagagtctcaacaattcacatcatggacttctgctgcattcacatgttgtgatctgtaggacacatttgtcctgagtgactcagtgagcacagtgagaccttgctgtcttagtctgttcaggctattatcacaaaataccataaactggtagcttaaaaacaagagaaatttatttctcacagttgtggaggctgggaagcctgagatcaaggtgacatcaggttttgtgtctggtgaggaccaactttctggttctttaacagtgctttctcgcttgtcctcatattctggaaggggtgaggatatctctggggtctctctctcttataagagcacaaatcccattcatgagggttccgcttgcatgacctaatcaccccacctcctaataccatcaccctgggggttaggatttcaacatacgaattttggtgggacacaaacattacaaacattcagaccatagcacttggtacttgctgctctcagaaatttcggtttactgaaattaccacacatgggttataataatggcctacctcttttaactgcttatttgtgagagtcacatgagagatgtgagcaccttaaaatactgtaaaaatacttttaatgaagaaattctataatgagattttattgtacctaaactcagaagttccagtgtccaaagtggattttccatttgactattcattgtgattgatggagcatattttggcttcaatatgctaagcaataactgttctttttctgttagctattagctattggcattaaggcatgccttagtctgcacaaagcacatcagtatttgttatcaaagatgaatcatcttttttttctaatcagttaattaaaaaaaaacaaaattaacaatgacaaaaacacctatcagcaccttggaagattttataggatttctttataacaaacagcttatttgaaattaggacaaatctttctaagggttcaatgatgtttacctttttccccctttgttctgtagttacttttctgcagcagctgagtatcagtgaaccaaggaaatagtttattcttgatgtcatataatactgtcattttgtccacacattgatatcattagaaaatgtcaagtgaggccaggcgcggcggctcatgcctgtaatcccagcactttgggaggccgaggtgggtggatcaagaggtcaggagatcgagactatcctggccaacatggtgaaaccccgtcgctactaaaaatacaaaaattagctggacgtgttggcacacacatgtagttcaagctactcgggagcctgaggcaggaggatcatttgaaccacagagttggaggttgtagtgagctgagattgcgcaacggtactccagcctggtgacagagcaagactccatctcaaaacaaaaaaaaagaaaaagaaaatgtcaagtgaaaattattttctttttatcagcccatctatagtttcttcatgatttgttcagtaggaacacatagataacttagggctctcaagataagtagaaatttttttaaaaagttgttacaaccggatattttttgaatatgttaagatttgatggttttatttattggtagtgtcattggtgcacttgaatatttcatgctctgcctgaaattcatgtcttgccgggaaagttgtacttcattctgtttgacagaagtattaaaaggtgttaggtgtagtgttgcgtgcctgtagtcccagctactcgggaggctgaggcaggaggattgcttgaacacgggaggcggaggttacagtgagctgagatcatgccactgcactccatcctgggcaacagagttaggaattgaactattcctcctccacaaaataaatttcacttttaaattgtgtatacttgcaactcaatgaagtgaatttaggaatactttttttttgatattaggttttatggcagtaaaattttgtcatgtaagtgtaaattaggtgtctgattaattctgatatagaattatagaattaggcccagagttaaaaacattgggtttattccctaccgatatgcttatattaaaattaaaatgacagccttcttctttcaaatgcattctaaggccttttcttcaccccaccaccacctgtttcttcccactccccaagcccattacccttttggactttaagttttcatttgcacctgactgggttgtattgttaggggggtaaggggaagtagaaagaaaccccagctgttttcttgcataaacaaagtatggggttgaggaggcaaggagagtgagagtggaggctctggcttggtcagtgtgatggaaatgaatcttcctttgcttcaggtctattttccagggagtcctgggtgggggggtgggggctgtgggcacttgaaagaatagcagaaacctcactcctggaaatttgtgttttatacaatagctttctaagtgactaggttaactatctcgtgaggttacaagtcatttactcttcaatggactgtaatctagcttctagccttgcctttcaattgcatctgccctcactggggtcgtagctaacttaagtgacttaagttgccaagcccaaagacatttttcagttcttattttaatttgatctctctgaagtagctggcattgttgaacacttcctaaatacttacttttcgtatggtttcagggacattaagacttttaagttttctttttttgttgttgaccatttcttgtcatttttagaagcccccacttcttcctccagccctttaaatgtgctgttttcccagtattccactctattcttcctttttgtttcccagggttatctcatctactcccagcttctacttatagtttggtaacttacagatctgtatttctaactctgtcctcttactgagttccagtcagatgttctctttatatctcaaactcaacttgagcaaaacaacacttaccaactaccaccccaactcttcctctgtaatcctaatgtcagttaattgtggtttaccctaagtcaaaacctgacattgttcataaaccctgctctttcaccttcctcagcactactcattattgttcgtgtcatgtaaaatataagattgttgccaaatttggaacaatgtcttccaagttccttttatatgccagctataagatttgtgaacccaaaatatctgagacaggtctcagtcaatttagaaagtttattttggcaaggttaaggacacgcctgtgacacagcctccggatgacatgcacccaaggtggtcagggtgcaacttgcttttatatatttttggaagacaatacatccatcaatacacataagatttacattggtctgatcttgaagggtgagacctcttgaagaggggtgggcttccaagtgataggtagatttaaaaattttccgattggcagttggttgaaagatttattataagtgaaatggaatgtctgggttaagataaggggttgtagagacctaggttttgtcatgcagatgaagcctccaagtagccagctttagagagaatagactgtaaatgtttcctatcagattcaagttctgtgttgatgttaatgctgcaggggtataatgaggcctgcaacctcctctctcatcatgagcagaactagattttcagggaactctggaatgtccttggccaagaagaggagtccattcagatggctggggccttagaattttatttttggtttacagatttcaaggcatttcacgttttcttgtgtagtgaataagcctaaaatactgttgtattttaatgaacaatcctgattagtttgttgttaacctcttccatatagtgttgtcttgtaaattcttacatttttttaattggaggaattttccacagactagcttctggctttgtacatttcaaaccttgtttaactttctttctccttcactactcacatgaccctgtgctgggtgcagtgatacacagctttaagaaaatgtcatgtggcttaggtgagttgacttaatgagaggtaggaagaaattcctggaaggcatttcttaaactaggacagctagggataacttaactttacacagaagtgactacgaaccacatcagtattttccactaaaccccaaacaagtatatttccaatcaacttccctttagctagatctagtatcacctgagaaaaaagcaagactgatgagtaagagtgaaaaaagaccaatcttaactgattgtggttagcatatcttttacaaattttacaaaaacatgtctgttacatataaagtttcggcgccacaaaagaaatagcacttgaatataaaattttctttttaattctcagcaaggccagttacttctatatagaagggtgcgcccttacagatggaacaatggcgagcgcatgtttggacaagggaggggaaggggttcttatccctgatgcacgtggcccctgctactctgtcattcccctattggctagggttagcccacacagactaaactaattctgattggctaatttaaagagaatgatggggtgagtgctttggcgggagtcagggcagagcaggtagcaggtaatcggaatgagttatggtggagcaggtgatggaatgagttagggtagagcaggtgattggaatgagtcagggtggagcaggtaattgtaaaaggttgctttatgaggaagtttaaaagtagaaggcaaagaattgaacatactgacatattaattatttgaaaagaaatttagaactcgtatctaacatgtctatgcaaaatattgctagggttcctctctgggccttgtgtaagtgaagggcttcggcttcattggctccatggtaaatcctctgacctcactacttctctctgtcttatgccctattgtcacccatcacaagcttttttttttttttttttttttttttttgacggagtcttgctctgtcgcccaggttggtgtgcagtggtgtaatctcggttcactgcaacctccacctcccaggttcaaacgattctcctgcatcagcctcccgagtagctgggattataggtgcccgccaccatgcctggctaatttttatatttttagtagagatggggtttcaccatgttggccaggctggtctcgaacacctgacctcaggtgatccacctgccttggcctcccaaagtcctgggattacaggcgtgagccaccatgccctgcccatcacaagcatttttccctctatctgcttctgtataagattgaaggaaccagtgatttgggatggttcccactgcctatcccatttggggggatacattcccagtacccctggttgaaattctgaatacacttcggataacaaagccattgttatcctgtgtataaagttcttcgtcgattatgggttaactaagtcttcataaatggcttaccctggccaccttaccaagatatataaatagctttgttttcttgggaaaatgtgtttaactttctaaacatttaattcacacacaaactcttctgtaaattgggggatgtcaacatgcattacagaggcttagaagaagaggacacataaatctaggctatcttggtctcctttgattgatttgttttgtagctatatttttccacttattcagattaagtttctcactcactttaagacaataaacctggcgtattatgctaagacactttgctatcttttatctgttttccccgtgatttaaaagtcatgtgtgtttcagaacctccacaaggctgagaaaaaaagtagtttgtggaggtgaaagatgagatacattttcagcataatccttatttcttaaaaccatttgtttctactgatggtcgatttcaccatatttaaatcatctttgttcataagtcattaggatttaatagatgacactctaatcttataatgtggcttttttcactataaatctggggcaattttgaaggccatatatgtctgtttcaaaggtggagaaacaaaatataagcttaaattagatggaaagcacctgttctttttcattgactcccagagtacacttctgtcatcatcattttgtaggtgacagatctgagggccagggattccattagagagagagttgaaacctgaacccgtgactctagatacccagccctggcattcagagatttttgggatcaagtcagaatatagaaacttgaagatgattttctacttctggatgtcttgctgttttgtagcatgtttcgtgtttttgtttttttttttgtaaggcagctaagggggttggcgccctacctcataagattacaatactgaaaactgtgattgtagagggcttaggtgcccaaatgccaaataaaaagtgactcagtcatggaaaagaagccaacattgcttcagtgccttaatgtatgtttagggagaattcagagattaggcaaaaaggacagagcaagttagattttagggtttaagaatgcctaagtaatgtaatactgattcatattttctccatatttaaaaaatatctgtcactagtacaatcccttctgacttccaaagaagctctatatgtgtacttaagaagtaatagaggcatgcaattaaaaaccttggcgattttgaataacagtgcttttttcaagtagagtatttctgtacacactttatataaaccaacaaatacagcacacgtttcttcactatcacaaataggcttctacttcagtgagattcgaatatatagtgtggccattacagcaagctaggtaaaaagtattcccactgtgtaggacttaagtgaagggccattgggaggtcagcaacagcagttgcttccctttgcattgaacgtgctgtgaagaatacaacaagaataattagttgagccacaagacttcagactttagaagaccgaccggcttattgttggcttgaaaatttattttgccgccgggtgcggtggctcacacctgtaatcccagcactttgggaggctgaggtgggcggattgcctgaggtcaggagttcgagaccagcctggccaacatggtgaaaccccatctctactaaatatacaaaaaaattagccaggtgtggtggtgggcgcctgtagtcccagctactcaggaggctgagtcaggagaatcccttgaacacgggaggcggaggttgcagtgagctgagatagcaccattgcactccagcctgggcgacggagtgagactccgtctcaaaaaaaaaaaatttattttgcctactctctttttggggactttgaagaaagatatggttgaaacctgcacaaaatgtggagtttacaggaccagaaaacgatgtgtcctcagggctcctttacaagctaacagcgcttcattcattggacctgctccttgctgcttttgcacttggggtcgccatcaggtggcaacacaaagaattgaagctgctattgcagaaccactcttgctaagccctgctgtgaaacacagttttgcttttttatttgagggaatgaagttgctttggatcaagagttatagggaagagatgaactgacaataatgaggtcggagatgtatttggcagttggatcctgaagtagccattatatttagtatccagcattcacagagagagaattagaaattattttcaagcttttctttactggaagaaacttgaatgcagtctttcaagtagccaggcgatcccctcacttgaggtagtagcagttgttgccttgattgtaggacataatggtgattggatgatttctttttttagagacaaggtctcactctgtcacccaggctagagtacagtggcacaatcattgctcactgcagcctcaaactcctgggctcaagccatccttccacctcagcaccaccatacctagataatttattttttatttttcgtagagatgtgatctcatgatgttgcccaggctgatcttcaactcctgggctcaagcaatcctcccgcctcagcctcccaaagtgccggattacaggcgtaagccaccatgtctggccatggatgattttgaaagtcaagaaactttgatcaggcatctgctacatccagggcactgtggccaatgcagggcataatatgaagtctctgaccttaagagcttgcagaataagttgggaagtaggatgtgtggcatagataacaggttccaggctatgttaagggtattgtagaggaaaactgggacttggtccttcaagggaaaggagacctcagcaggtaattatagcattctagagcctggaggaatggaccagtgtgtgtgcaatgtagggggaagaattaggggaacagagtctcagaggaagagttccattcaggaaatagtgagaggaaaagttggagagtgcaggtaatatattgtgaggaacttaaatgagaatttgactagcaacacttctataagaatggacaaaagtaagagggtgaaatatttcatgggggaattaatttttgaatgtatttttgaagcacttttcatacttttttccctcatttaggaagactaaagctatgtttgaattgtcagggcaaaaggtactttacctctgccctctgaaggttctataactgagtctgctgaaatcaactgataatagattaataggagaaaagttatacacattatttatttccttttaatgttagttgatatgtaatgtacacatttatggggcatagtgtgatatttcaatacatggataccatgtgtaatgatcaaatcagaacaatcagcatatccttcaagtcaaacattgattatttctttgtgttgggaacattaaaaatcctctcttttagttttttgaaagtatacaataaattattattaactatattcaccttgtagtgctatagagtactagaacttattcttcctatctagctgtaattttgtatttgttaaccaacctcaccctgttcttccctccctgctacccttcctggcgactgataaaccacagttctactcactgcttctgtgacttcaaccttgtctagctcccccttgagtgaaaacgtggtatttatcttcttgtgcctgacttatttcacttaacataatgtcctccaggctcatccctgttgccacaaatgacagaatatcattctttcttttttatggctgaatagtattaccttgtgtatacataccacattttctttacctgtttatctgttaatggacatttaagttgattccatatcttggctattgcaaatagtgttgtattaaacatgggagtgcagatatctctttgatatgactgattctccttcctctggataaatactcagtagtaggattgctggatcttacgatagttttacttttagggaaaacttcataccgttttccatattggctatactaacttatattcccaccaaaggtgtataagagtccccttttctctgcatcttttccaatatttatttttttttgtcttttttctatatggaacacttcacaaatttgcatgtcattcttgctcagggaccatgctaatctttgtgtcattccaattttagtatatgtgctgcctaagtaagccctgttttttgtctttttggtaataaccattctaactagggtgagagatctcattgtggtttgaatttgcatttccctgattattagtgatgtacagcatattttgcctatgcttgatcatttttctctttttgagaaatgtctgttcagatcctttgcacgtttttaattggattactagtttttttgttgttgttgagttttttgagttccttatatattctgggtagtagtcccttgttggttgtagagtttgaatatactttctcccattctacaggttgtctcttcattggttgtttcatttgctgtacagagttttttagtttgatatagtcctatttattaatgtttttgctgcctgtgcttttgaagtcttacctatatcatttttgcccgtattcccatatgctttcttctaatagtttttttttgggtcttatgtttaagtctttaattcattttgagttggtttttatatatggtgagagatgggcatctagtttccatttttctgcatatggatatccaattttcccagcaccatttattgaagaaattatcctctcaccaacatcaattcttgttgcctttgtcataaatcagttggctataaataggttgatttatttctgggttctttattctgttccattggtctatgtatctgtttttataccagtaccatgttgttttggttactgtagctttgtggtatagtttgaagtcaggtagggtgatgcctcctgctgttttatttttgtgcatattgttttggttattcaaggtcttttgtggttccatgcaaattttaggatttaaaaaatttctgtgaagaatgtcattgatattttgataaggcttgaattaagtctgtagattgctttgggtggtttgttcattttaacaacatttatttttccaatccatgagcataggatgtccatttttttgtgttcttttctatttatttatttaatttatatgtatgtttttgagataggctggtcttgaactcctgagctcaagcgatcctcccccacttggcatcccaaagtgctgggattagaggtgtgagccaccgtgcctagccctctttgatttcttttatcagtgtttctagttttcattatataaatctttcacctccttggttaaatttattcctaagtggtttttttgtagctattgtaaatgaaattgatttctttttcagctagttcattgttggtatatagaaatgccactgatttttaaatttttatttatatttgtttatttaaaaaaatttctttttggagacagagtgttgctctgtaacccaggctggagggcagtggcacgatcttagctcactgcaacctccgccttcctgggctcaagtgatccttccacctcagcctcccaaatagctaggactacaagcgtgtgccactgtgcccagctaatttttgtatttagtagagataggttttgctgtgttggccaggctggtcttgaactcctggactcaagcgatctgcctgcctcagcctcctgaagtgttgggattacaggcgtgagccactgctcctggctgctacggatttttgtatgttgattttgtgctactttaatgagtttgtttatcaattctaagaggtttttggtggtcttttgttttttctatatgtaagatcatgtcatctgcaaagagggacaatttgacatcctcttttccaatttggatgccttttatttctttctcttgcttaattgctctggctagtacttccagtactttttcctgtagatgtatctattgtgttgtttgagtagagtgctttggctttgttcctgggtgagcgcagtagtgtagtctctgtatgatttcttttttttttttttttttttttttttttgggacagagtcttgctctgtcgcccaggctggagtgcagtggcgcgatctcagctcactgcaacctctgcctcccgggttcatgctattctcctgcctcagcctcccgagtagctgggactacaggcacctgccaccatgcctggctaatttttttgtattttttttagtagagacaggatttcaccatgttagccaggatggtctcgatctcctgacctcgtgatctgcccacctcggcctcccaaagtgctgggattacaggcatgagccactgcacccagcatctttgtatgatttctttggctgtaatcactatcaatcgtgtcagtaattcctcagtggcttacgctgtagtttgtggaggctgttaggcactttttttttttttttgagacagggtctcgctctgttgccaggctggagtgcagtggtgccatctcagctcactgcaacctccacctcttgggttcaaacgattctcatgcctcagcctcctgggactacaggagtgtgccaccgtgcccagctaatttttgtatttttaatagagacggggtttcactatgttggccaggatgttctcgatctcttgccctcatgatctgcctgcctcggcttcccaatgtgctgggattacaggcatgagctaccgcgcttggcctgttgggcacttttgttggacataggggtgccaggcagtctggttctcaggtcactaggtgacacatacagctacatggcattcctgctgctggtgtggatggcaggctttgggtggactagtcctcagcactgtggtcattgtgcatgagggccagcagtggtagttgtgggccccaggtgaactggtcctctagtctctgcactgcatgcatggcagtgtggcagctctactactggaggggtggggtcactgtcagtgttggtggcagcagacctgggcaggtaataaggtgcaggtgcatggaagtcacacaaggtacaaacctcaaagaagggccaaatgggtgatgcctacataccctcttcatagggtggagggaaggggagtatgtaggcaattttagaggaagagcaaattattttgaggggagatgaatgggcccaaagaacagacagtagcctaggacaaaattcatctgggctgtgtgtgtggcacctactctagtcttctttcatgtgagttaatcttctgtgtttggtgagattatagggagggggcccaagaaaatagcattccttctgagggaacttcagagaaatcgtccctttgcacttcaggagagacaaagggaagggatgagagaccgtggccgggatggtgagagaaggtcagagagaccttcgttctgaggctgcttctttacttcaaagtactcagcatgtcaaagtgacatactctggggtattgttttctgaaccctaacaggatctttaaaatttcttctagtctttataattttggaaattataaatccttctagaaggaacacaatttggaaggagacttggcttaattacatttaatggttttaatttcaaagggaacaactggctcaaaaattttagtagtaactgttaagctataaataagggtgacaaacagccttctatgatttgggcaagatagaaaaaaatgaaatgaaactagggtgaaggttatagatagaatgcgtgttccaagatttggtgtacttactagagataggtggcaaaattccctgcactttccagcagccaaggcagtagggacccacactagcagttactcaatttacggtgatgttaaataggacagatactgccaccacttagtgttcagaaaagtgttttttttgtaggccgtcataaagagaattctcatgaattctgtcaacaatatccccttagctaatacagtatcagatatcaaacaatcactttttataatgtccctcagcctcaatcagtagcatgacaccaaagtacagtacaaacaattttctgggacttgaaaccatccagtccaagtaggcagttctctgaagctctaccttaatttaagaataaaatgtaagagcatggaaagcagttttttgactggtgattctcttttggattgcacacttctttgggaaatagatgataggtctagattcctttccttgtcaataagcatatgcatcatcgcacaaattttacatgttattttaggaaattcacaatttcagagagttcataatcccttaccctacccctcaccccttcacccttgtcccgccccaccctcctgccctgactgatccaggctcagcaccctggtcttcaaggctattgtgagttaacatggtaagaacatgcagtatgaggatggttgtgctggtttgacagattcctctgctttaacaggaagccacatcgaggatgggaattgattttcatttatgaaagttgatgaacttgacatctctgaacaaaagatgtttatttcgctttggtgagaatgtagtcaggaatgtgatttttcttagagaacagctaagcataacaaattaaaaagggccccaaatctccctctcatagaggaagctctaacaattttagcctagaaaaattataaggcagatattacaaaggaccatctgagctatcttaaaccaacaaattattggtattttcggtatttgatattcttggtacagagctcatagaatgtctttattttaagcaactgcagtttcttggtgaacctaaaataaaaatccttgtgtaatatatcttgggaagctgaataactttattttcttttagaattatttatcatcttatcatcaaccagttatttgttgaaaacgtttatccagttatatctgctttagattctcgttaattgtggtttcctttgcatttcagtgttctaatcttaggcgcttcaggcggagttggtacttttgctatacaggtaaaaccattttttaatcttgtgaataggaggattttgtttgcatgaatttataaattaagatacattatttctccttaaaagctgagagaaaggtaggtctggtaaatgtactgtaatttcagcttgttctgtaagaggaaaatattctttttttattagaaaaaattattttttagagatggagtcttgctgtgtcacccaggctggagtgcagtggcacaatcatagctcactgtaaggaaaatattctaatgtagaaggaagcattaagctttctagtagtttaatatgagtgggtgtgtggatgtccttgataacagacgtaggaaagcttttaagaaggaagaccatgggcagtgcaggtagatggaagttagcaatttaataggaaacagccaatgtcaaaaaccaatactagtttccaagcagaatttttgcaggctaaaaagcctgcaaaatgtagaaattggtaagctgattctaaaatttatatagaaatacagtagccaaaataccgttaagatggcaatactcccctgaagtgatttatagattcagtacaatccctatcaaaatgcaactgctttttttttgcttttcataaatggacaagttgaccccaaaatgcatgtggaatcacaggggaccccaaatagccaaacaatcttaaaaaagaataaagttggaggactcacacttgctgatttcaaacttactacagagctacagtaatcaaaacataagggtgaacttatagatcaatggaatagaattgagcatccagaaataaacccatacctctgtggtcaattgatcctgacaagaatggcaagaccattaaatggagaaaataatagttccttcaacaaatactgctggaacaactagatatccacatgcaaaagaatgaagttgagcccctacctcacatcatattaaaaaaagaaaaacaaccctcaaggtcaggcatggtggttcacacctattatccctacactttgggaggcaaaggtgggtggatcacttgaggtcgggagttcaagaacagcctggccaacatggtgaaaccctgtctctactaaaaatacaaaaattagttggacatggtggcatgtgtctgtaattccagttactcaggaggctgaggcaggagaattgcttgaacctggaaggcggaggtttcagtaagcctagatcacgccactgcactccagcctgggtgatgagtgcaactctgtctcaaaaaacaaaaacaaaaacaaaaaactcaaaatggatcaaagatctaaacataagagctaaaactgtaaaactcttagaagagtaggcagggaaagggaaaaaaagagtcttggaaggaaacataagacaaaatcttcatgattgtagatttggcaacagatttttagatatgacacccaaagcacaagcaaccaaagaaaaaaattcatcaaaattaaaaaaacttttgtatgtcaaagggcactatcaagaaaatgaaaagacaacccacagaatggaagaaaatatttccatatcattttctggtaagagtctagtatccagaatatataaagaactcttataactcaacaacaaaaagacagcacagtatttaattagcaaagaacttgaattgacatttctccgaagaatatatacaagtggccagtaagtccatgtaaggatggtcaatatctttatttattagagaaatgcaaatccaaaccacagtgagatactgtgtcttacaataaaaagcaaacacagaaaataaaaaatgttagcaaagatgtaaataaattagaacactcatacattgctggtgggaagttaaaatggtgcagacattgtgggagagtttcttgggtcctcaaaatgttaaacatagaattaccatatgacccagcaattccattcttaggtatatacccaagagaaatgaaaacatatatttaagcctaatcttattcatgaatattcatagcagtattattcataatagtgaaaaaaagtggaaataactatcagttgatgaatggataaacaaaatgtggtatagacatataatggaatattatatatctatattatatatcagccataaaaaggaataaaatattgatgatgatacagcatggatgaatcttcaaaacatgctaagtgagaaaaatccagaaacaaaaggtcctacatattgtatgattccatttatatcgtatgtttagaataggcaaatccacagagacagaaagcagattagtggttgtcaggggctgggggtagatggagaagggagtggggaatgactacgtaatgagtgtgaggcttattcttggggcacttaaaatattctggaattagtggtgatggttgcacaacattgtgagtgtactagagactactgtatactttaaatactttaaaattgtgaaaatggtgatatatatgaattttacctcaaataaaacaaaacaaaccaaaagttccccaagcctccagaaacatgatggggcccagtgactgctcctgttgtggtcagatgtgtaactgactggctcctagaagagggagcttgattaagactctctcaggatgaggggagagattcttttccccagtaggggccagcgagtagcctcagaggctctgccacattactttccaggagggaggtttgggtgttatagaccaccccagacccagcttagactttttgagaacccagatggtgctggaggcttcctgtctgtctgctgactgaactaggtgaaggaggcgaggattcctgggatgcacactttaacttcttttaactcatcatttgataatcagaatccaatccagaggctcagtaaatatgagttgaatacataaataaatagaagaaaggaaaagagggagagaggcaaaaagaaaagagaaatatcatacacagttggttagagtataaattgatacagccacttaagaaaaccatttggcatctactaaatgtcaatataaattgtaaaatttctaaaaaaaaaaaaaaggacagcacaagaattcctattttaggattataacctatagatagatatacaagtatgtttaccaaaagatatgtaccagaatttcagagcagggctattcctgttaaaattccccaactagaaaaacccaaatgtccatcaacagtaaaatgagtaagtaaattgtggtatattcttacattggaatattatgcagtcatgaaaaaactataattgcacacagtgaagtggatgaataccacaaccgagtgttgagtaaaagaaatcagatgcaaaagtacatcctatatcgttccatttaatgacattcaagaacaagtgaaactaagcagtggtgtttaagggtggtgtctacttagtaaaacttcttaaaaaaaaaaaaaagcaaaaagggttacactaaaggtccagttagtagttactttttaagggagttgaggaggttttaattgggaggcttagggacacaggtggtattctaattcttaattttgaatagtggttataataatatttgctttgtaataatttgttaagctgtatatttatattctgtatgcttttatttgtattatattttacaacaaaaaattttaataaaattaaaaagtaatagaaaagcatcaaggttaaatcccatacaaagctattataaggaaagggaaaataaggtatagaataacatgccctataataaaagcacatcagaatacatgcctacagaacagcctgaaatgtcacctactatttcaaagcaagttaaaagacattaaaaatataatacaagatgtgaaaaaaacaaaataaatcagaataggaaaaaatcaggaaaaaagtaaaactaaatgaaaaaatcatttagtaatagaagactaaactaagaggaactcaatagcaagtaaacacaacacataatgctccttaatagaaacaaaatgcatggatcccttccttacaccttatacaaaaatcaattcaagatggattaaagatttaaacgttagacctaaaaccataaaaaccctagaagaaaacctaggcattaccattcaggacataggcatgggcaaggacttcatgtccaaaacaccaaaagcaatggcaacaaaagacaaaattgacaaatgggatctaattaaactaaagagcttctgcacagcaaaagaaactaccatcagagtgaacaggcagcctacaacgtgggagaaaattttcgcaacctactcatctgacaaagggctaatatccagaatctacaatgaactcaaacaaatttacaaggaaaaaacaaacaaccccatcaaaaagtgggcgaaggacatgaacagacacttctcaaaagaagacatttatgcagccaaaaaacacatgaaaaaatgctcatcatcactggccatcagagaaatgcaaatcaaaaccactatgagatatcatctcacaccagttagaatggcaatcattaaaaagtcaggaaacaacaggtgctggagaagatgtggagaaataggaacacttttacactgttggtgggactgtaaactagttcaaccatcgtggaagtcagtgtggcgattcctcagggatctagagctagaaataccatttgacccagccatcccattactgggtatatacccaaatgactataaatcatgctactataaagacacatgcacacgtatgtttattgcggcattattcacaatagcaaagacttggaaccaacccaaatgtccaacaatgatagactggattaagaaaatttggcacatatacaccatggaatactatgcagccataaaaaatgatgagttcatgccctttgtagggacatggatgaaattggaaatcatcattctcagtaaactatcgcaagaacagaaaaccaaacaccgcatattctcactcataggtgggaattgaacaatgagatcacatggacacaggaaggggaatatcacactctggggactgtggtggggtgcggggagcggggagggatagcgttgggagatatacctaatgctagatgacgagttagtgggtgcagcgcaccagaatggcacatgtatacatatgtaactaacctgcacaatgtgcacatgtaccctaaaacttaaagtataattaaaaaaaaaaaaaaagaaacaaaatgcagaaaaaaattcaaattacaaaagaaacaaaaagataggctgggcacagtggctcaccctgtaatcccagcactttgctaggctgaggagggcagattgcttgagctcagcgattcaggaccagcctgggcaacatggcaaaacctcgtctctacaaaaaatacaaaaattagctgggcatggtggctcatacctgtaatcccagctatggagaggctgaggtgtgaggatcacttgagcccaggaggtcgaggctgcagtgagctgtgatcacaccactgcacttcagcctggacagagtgagacctatctcaaaaaaacagaaaaagataaaaacagagtcaagagaaagtatcaaatattgatgacaggcaaggaaaattgatatatggatactaggagtcctcgaaggggaaaaccaaagcaagggaattgaacccatattaaaacaataattaaagaaactttcctactgtcctgaaattaaatgatttgaaattacatattgaatagacacatcacttttctaaggacatggacccagactgagcaacactaaggaaaattactaataaaaatgtggagaaaaattatagtgaaattactggcctttaaagaaaaaagaaataagatcctttggaaatctagacaaaatagcacatgtgctacttatgtgtccatataagaaaaaagatgacgtgacttataagagaaataaaattagactatcatgagactttttggcagtaacacttttggcagaaaaaaatggagtaacatatttaagatactcaaggaagagtgcgccaagaatcttttatacaacaaaacaggccttcaggtatcatggacacatacagactgttatcaacatgaagaacgtggggaatattgttcttctgatccttttctgaggaatctactagataatgagcttctgactaggaatgactatgaagacattttaaggactagtggtaaatgttcaacacaattacctgtagaacaaaactaaatgagggcttagaaggagagagtgtaggaacagccatatgttctgataaggtaaatacagtgcaatagttgtcattatttttgagacagtgtgttgctctgtcatccaggctgagatgcagtgacatgatcacagctcactgcaacctcaacctcctgggctcaatgatcctctcaccccaaactcctgagtaggtagaactacaggcacatgccaccatgcccagctaattttttcacgtttttgtagcgatggggtcttgctgtgttgcctgggctggtctcaaattcctggcctcaagcaaccttcctgcctcagcctcccaaagtgctgggattttgtagtctcaaattagaattggaagtatcaatatgaactcaagagatattttgtgtatgtgtgtatgtaaagccatcacttgaaatatcatttctcactgaaacaaggcagggcttcttagagaagtagctgatttcagatctagagcacaaatataaagaattaacctggagtatattaaatagcaaggaagatatcaaagactagtcaggtcatgtcaaaagactcaagagctaacttgaagaaatgcccaaagatgtaacagtttgagcttcagtaataataatgaccattacaatgggttgaaaccttttaaatatatttaaatccatgagttcatgatacttttttcaaaagaggtcacttttggaatttgatagggaaccaatttattatcttataaactgataaagaaaaacagttaagcatttgtcttgcctttcctacattaactgtataattgagcagacaaaataatatgtgaggggcagtgatatgaggggcagtgttattttgtgaaagtattcaggctggacgcgttggctcatgcctgtaatctcagcactttgggatgccaaggcgggcagatcacctcaggtcaagggttccagaccagcctggccaacatggcgaaaccccttctctaataaaaatacaagaattagccgggcgtggtggtgggcacctgtaatctcagctactcgggaggctgaggcaggagaattgcttgaacctaggaggcagaggttgcagtgggcagagatcacgccactgcactctagcctgggacagagcgagactgtcccccacaaaaaaaaaaaaaaagaaagaaagtattccaactacttaaataaaagaagtagaattagaagatcactatttcgcaaccaccaataagcagatatgggtattaagcattgacagctgctaagataataaagagagcctcaagcagacatgatgtgcctcctctagttttgccagacactgtccatagttttgctaaagggattgaaatggaatcagatctagtctccagatccatctgccgagttgcagaaaatacagaggacagagcgacgtgtggaactgtcccgtgggtgtgcagttagaaattccagactgtgggaaactccacagatcaaatggcctagattcttccatagataaattataggaaagcaaagggatagaacaggagcctatgatttaaaagagacttaaggccgggcacagtggctcacacctgtaatcccagcattttgggaggccaaggcgggtggatcacgtgagctcaggagttcaagaccagcctggccaacctggtgaaatcccatatctactaaaaatacaaaaattagccaggcgtggtgtgacgtgcctgtagtgccagctactcgggaggctgagggcaggagaatcacctgaacctgggaggtggaggttgcagtgagccgagatcatgccactgcactctagcctgggcaacagagtgagactgtctcaaataaaaaaccaaaacaacccaaaaataaataataaaaaaagagatttaaaagataccacgttttaagaatgcacaagactatagtgtctagagactgcattgttgggtgataaactttttgaaatgcaaggaggtgattactataaaaatcagaataattattttgggaaagggtaggaggggcttctgtggtttggggcacatgggagaatttttggcatagcttccagtgtgctgctgctttatctgggtggtgttcaccctatagctgttttctttctttctttctttttttgttttttgttttttgagacagaatctcactctgtcacccaggctggagtgcagtggtacgaccttggcttactgcaacctccacccccgccggctcaagcgatcctcccacttcagcctcctgagtagctgggaccacaggcatgcatcaccaggcccagctacttttttgtatttttagtagagacggggtttcactacgttgcctaggcaggtctcagactcctgagctcaagtgatccatccatttcagcctcccaaagtgctgcgattacaggtatgagccaccacaccccgtctataggtgttttctatagttgtgttttatattacatgaaaaatttttattaagtaaaactgtttttaaaacattttcataatgttcaaagataataaatagctctaaatgggaaaggaaaaactagaaatttgaggggaaaaaccagaaatttgaggaaaaaaacctgtttcaacatgtgacagattcttcctgaggatttaatactgtttaaagaaaaacatgtattaaatgtgggtgcttagaacatacttttctttttcctcaatagtttcttttttaatataggtatagagaaaggatggtcacaatgagctattcatcttggattatattcttcacatatttgaatttgatttgggacttgctgtgaaaagcaacgtatcattacactcaagtgtctctgtttgcagcccataaacaataaattgtatatcatatcactcctaaatatttcaattccccacagattttcaggatatataagtctttggtcaatgttgctttttaaaagtgagaaattgggtaagattatgaataagttaaaaaccctttatttacattttgtatttaacagaaatttactaagcacctttgtgtgccatggagtagggattcaatagtgaaccagacaaacacagatcccttgtattctagtgagcctttatatcttatattaaggaagttcaggaaattgatacttaggacaagattgagaaaacaagtgatctcttatgatctataattatctgcacaaaaatttcttagtaatcttcaagtggctattctcaaattagctgaaaatagcccccttttaagtctatgaaattaacattatagaaaagaattttagcaattttggagcagaatgctttctggatacttaattctgaataacattagaatttagctctccttttaatttaaatctagttattctttattattttaaaatataaggcatctgcattttaaaacctgggtaacatttatttaggttttcttactccaagggagaggacctgatccaagtttttaagaaaaaatgattatagtttcttccccttctttttaagagaaccttttcatatgttacctattacttaatagctcattactttgacacgctttctgattcaatattgtgttaacacttattagagatgcaaatgaagatatgtggcattttaatgttctgtatacattttaaatagtcatttttctgaagacatactatttttgggccatttaactttgctatccttgaaagtgctaaatttgaggcttttttttttttgagatgaagtctcactcttgtaccccaggctggagtgcgatggcacgatcttggctcactgcaacctctgcctccggggttcaagcgattctcctgccttggccacccaagtagctgggattacaggtgcccgcccgctaccatgtccagctaattttttatatttttagtagagacggggtttcaccatgttggccaggctggtctcgaactcctgacctcaggtgatccacctgtctcggcctcccaaagtgctgggattacaggcgtgagccaccgcacttggcaaatttgaggctttcaactcctgtcttttctgttactgttgaggcactgagtccctctctaagtggattagttataacttcatgacaataaggtggctggctgtctcatgtagggaaaatgagatctctttcttgggattttcttactgaacaaaagtttgaccatttttactagtctctgacagatggcttcctatagttctggttaagatgacgtacttaaagttctctagagattagtctgatatatgtatacatggtgccaatgatttttttttcaatgcagtcagtttttctaatctctcccttttttattctttttttctttttggtggggggcaggtaatgaaagcatgggatgctcatgtgacagcagtttgctcccaagatgccagtgaacttgtaaggaagcttggtgcagacgatgtaattgattacaaatctggaagtgtggaagagcagttgaaatccttaaaaccgtatgtattagaacaatgttcacactgggagtgggaacaaggacagttgattatgcaggtctgagatggcttggtggctttacaatcatgttggaatcttgagaaggatctatgaaaacattccatgtcactagaagttacttaggttggcttctgttttaattccagatgttaatacaacacagtaacagcatgtggataggcactgaggaagttattttgcttacatggtctttgctaatttttaagttagcatgctggtttgtaagaggcctgaagacaaaattggaaatgtgttcccttctgtggcatctgtcaccacaggaagaatatagagtagttcatgaaatacatgattagcccaaaacatactttcgtgttttggcttaaaaaaggcttaagagaaacagtgtaagtctaaatcttggtaatgggagcactgtggatgttcccagtgtgtctgaatgccaggctgtggtttggcctgaggtaccaagcaggaatgcattcaggaattctcttgggtcatgttgattctgactgtgactccagcttattcatctgacctttatccagccaagaccaagctgaagctgagagcagaaatgaggagtatttggaaagctattttactgcttctgtttaaaaggttttcccttttttgattagttttcagaagtcaactactcttgaccacattgagtagaagtatatttttaaagagaaagaaaaaagaaaaaaaagggagtccttatctgacaccgcccagcctttctcagccagtgccaccaacttctagcagtagtttggtggtgcacccagcagcagccagccaactcatcattccttcaactgttcagggagcttctactcttgccaggcagggttccaaacaccagctacagtggtgaaccagacaaatgcccactttcatggagcttacattcttgtttgggcggttttagtggtaggtgctctgaaaaaaaatgaaagggaatagatagggaggaggctgttataaatagcaaggttaaagaatgcctcactgaggaagcaacatttgagtggaggctttagtgagcaagtcaaatgaatgggatttgtgtgtttgtgtgttgctccctgctgtatccctccagctggaagagtgtagtagcatgtagtaggtgcttaataatatttatttaattattgagggaatctaggagaacaattgttccagctggaaagaacagcaacctaaagctcccatgtccggaacatgcctggcatgtttaaggactaacattgtccctttcagagattttgtcagctaccgtcttgtctgtgtgtcagggcctaagcctctttgggcgccttgagagtgacgacatgacaggtctctgagatctggcttctagaaagcagtagtttaggttgatcttgtatcttttttttttttttttttttgagatggattctcactctgtcgcccaggctggagtgcagtggcacgatcttggctcactgcaacctctgccttccggtttcaagtgattttcctgcctcagccccccaagtagctgggattacaggtgtgcgccaccacgcctggctaatttttgtatttttagtagagatggggtttcaccatgttggccaggctggtctcgaactcctgaccccgtgatccacctgtctcggccttgcaaagtgctgggattacaggcgtgaaccaccgcgcccagcccgatcttgtatcttctgatgcttctaggaatagcaacatgatactggggccaagttctacccattcccctctatctaccttaaggggttttgttttgtttttttgtatttgtttttgtttgagatgaagtctcactctgttgcccaggctggagtgcaatggcgtgatcttggcacaacctctgcctcctggattcaagtgattcttgtgcctcagcctcctgagtagctgggattacaggcacccaccatcacacccggctaatttttcaattttttttttgtggagatagtttcaccatgttggccgggctggtcttgaacccctggcctcaggtgatccgccttccttggtctcccaaagtgctgggattacaggcatgagccactgcacctggcctaccttaagttttatacatgtctggaatttgtcaccagagagtaggagaacttgacagacggaaggctagaggacactcagtctaggctcccaaagcggtgctatgcttccctccttggcatctcttcctggcaagtggtcttgctcctttcgcttgtacttttctagtagggggaacttcgtgacttataaatgcatgccgttactacttcttttctttgatagctttagttaaaattgatctttgtaatttctgcctggagtttgacctctcagtctacctaggataaatatgttcctccttccaaatagcagctttttaggtatttgaatcttagagttttatagcaagaaggggctttgaaatccttcagtccaaccctatgatgctgtagttgagaaagtgaagggcagaggagttatgagtttttgcatacttgaggtcatgccaccagtcatttgttgggagagctggatccacaacctggtctccagatttctttctcagacaatgcctgttctataataccaggctgcccttaagttttctttaagttaagtatcctcagatttgttcattcaaaacttggaaatgaagtagacacttttttagtgaaaagaatggtcatctattaaggtcatcatgctcctgcatttcatatccttagattttaattgccttttttcttcttcttcttcctcttcctcttcttcctcttcctcctcctcctcctcttcttcttctctttcttcttctccttcttcttctccttctcctcctccttctcctcctcctccctccctcctcctccctcctcctccctcctccccctccctcctcctcctccctcctcctcctcctccaccgcctcctcctccttcctcttcctcttcctcttcttcttcttcctcttcttcctcttcttcttctgagtttcgctcttgttgcccaggctggagtgcaatggcatgacctcggctcaccacaacctctgcctcccgggttcaagcgattctcctgcctcagcctcttgagtagttgggattacaggcatgtgccaccacatctggctaattttgcagttttaatagagacagggtttctccatgttggtcaggctggtctcgaactcctgacctcaggtgatccacccgactcggcctcccaaagtcctgggattacaggcatgagccactgcacccggccttgcccttctttattttagttctataagatactcaagatccacaaagttggccaaagtggttttaggaactttaatgtttgacatcatccagatgaatttgggagaaaagatttaccaaaaaggaattcatcaactgatttgctcagtttatttgcatgtattctctatatagatctttgttttcaaaattatttcaaagcttatttttatcccttttcaatagaatatagtgattacagaagttttagtttagatgtaagaagttgaatatctgtcagtttctgtggattccattatggctgaatttttttggcatgttagaacaggctgttcatttctccttttgcattgtcctgatgctgtacctgaaaccaaatgatagaaaatttcagaaggtgaagaggatgcttccatgagcatttctgactgtaaagagaataaaagcaaatcattcttgtaggtgaaaatctcatattttactttcaagtatccatgtgcactaaagaatactttatagagaatggaaagctttgcagttttttacaaagcttaattaagtcagactttctcaaccttggcaaccttagtttctcaactatcgacattttgggctggaaaattttttagcttgtgaggggctattctgtgcattgtagtgagccaaaaccactctcttttcagaactacttgctgaagccattctaaagtactagaaaatgaaatgattttatgacaaaaattagtcacattaaacttaccttggagaaaagtcatagatccagtgaatgagtatgtccttccatctccatcaaagcagccacccctctgcaggatggcgaggtgcagcacagtttaagatttgtcactgaaataaaccctaagccaactggtactggaagggaaggaggatcagagtccagtgtaaagcctgacaaccatgttttgatttggttcttcctctccagatttgattttatccttgataatgttggcggatccactgaaacatgggctccagattttctcaagaaatggtcaggagccacctatgtgactttggtgactcctttcctcctgaacatggaccgattgggcatagcagatggcatgttgcagacaggagtcactgtaggttcaaaggcattaaaggtaggaagaagggtcttggttggtgactgcaggcagcctcctgctgctagaaattggtttcccacctagccagtttctcttctcttggaggccgcatagcacggtggttgcaagcatggactctgcagtcacagtgactggcttcaaaatctgacctctacttagtagctgtgtaaccctgtgcaagttactgaatgtctctaagccccaatgtcttcccctgtaaaatgaggctgttaatagatctaccttactgcattgttgtaaggatcaaatgaagtagtccatatggagacatggcataatgcctagtacataaaaagcccttattaaatgttgcctttattattacttattgcctctcttgattacatctgatgtactgtctgtgcttccttcttgtctctacctgatgaccctctctctgtttcatgtcttaacacttaaagtctcttgtatataaagatgaaaacttacagctgctgttttcattgtattgggatagaccagtgattcccagactggggctttcagacatttagaggtctatgagtaaaacaagttgtacttttacttgagtaagcctccactcatgcctctgctgggattgtatcaacttgttctaacactgtgtattccgtgtaaatttgaaactccagctattaatggcatgatgggagtttctgggacttggttagtcagcctgactcagaaacagggccacttttaccagggctgtatggagctcaaaactgaatacatctcacccaaattgcacacatcggtgagtggcgggccttggagactagggcagatgagcctcagttacaagactaatagcagagcttgagcgtctgctctctactttacctcgtagcctgttgtcatcacagtggggagagaggcttttataatttcatgggataaactggtggtaattatagatcattggtttaaaatatgaattgatgttaaaatggaatacatgatagaaaaaataaagataggctgggcacggtgtcttatgcctgtaatcccatcattttgggaggtggagatgggaggattgcttaagtctgagaagtttaaaaccagcctgggcaacatagtgagagcttatctctacaaaacaataaaaaaatttgccaggtatgttggtgtatacctgtagttcagctgctcaggaggctgaggccagaggatggtttgagtctgggagacagagggtgtgagccatgatcgtgccactgtactgcagcctgggcaacagaggaagacgttgtctcaaaaaaaaaacaaattctatttttttaaattaagcaaaatacttgagactctggaacaaggcagtagaaagttcctcagtggtaaaaaggctgtgagtcgctgtgtcagtccgaccaacgctgacccacgtttgtgagatgactggcttgataattatctttagcattttatttattccagatattaatttgggaccttttatggggatgaaacttaggactttggtctcttgaattctgtgtactaagtacttagaggtcgtaacaaagagctatgatggaggagaccacgactcaattcttatgaaatattatgggtaatagaaatgaacaaaccaagcgctgcactgtggtgttctttattttcatttgattcagacagtagccagaaacagtgtccacagggtactttgtggagaaagggctcttagctgtcccttgtctcttctttctctttcacaaaacccagattttccagtgctttaaaatgtaagtttaagttttctgtaagatttcagtttgtactccagtgagacctcttacaagttaaccttcagagttgtcctcggagagtaaaacaggcacagctctcttcattctcttttcctcctacttgaaagatgatagtggtaatctcatgtgaaaaccttttaagtagttttcaatgtctttctgattgtgcacgtagttaaagcctcattgtcatgcttctgactctcctacctgctttggtttactttctctcctatagtggcctgggtagggggggaataacacagacctcttatagcagaatattaaaattctgctattacagaccaaaagtttcactttacagagccacatgctgtgaagagttacagatgtggcagttgtgaccatttctgttccttctttaataccctaaacaattaccagaatgttttaattgcagtctatgaagccagaccttagggaaaagtatttgaacagatcttctgtgattgtcatttactggatccacagtaagcttgggacattctcagtgcttctggcatttagccacataattcttcaaacagcttttttctttttcttgttttgtagagacagagtcttgctgtgttgcctaagctactcttgaactcctagcctcaagcaatcctcccaccttggtctcccaaagtgttgggattataggtgtgagccagtgtgcctggcctcttctttttaagttagttgcataaaccagtgcatctcaacatctttcatgccatgacagacatagaaaatgatagtatttgaacagcatgtagaggctgccttgggtaatagagatgaacaaaccaagccctactcctctaagaccagcctatctggagacttctaccagccctggctttgcctggctatgctgagggctaaggggagtcaatatctcatcacaccaattctagagtaagcttgactctctttatatctgtagtcctagggtaattattaatgatgaatcctttagctctcacaggttttctgggttagacgataatctatagggtcactcacccagtaagccatcctggcacacccagtgggaagctttgcctaggcaactgcttagttttttctttctttccacattcttaaactgaattggtattgtctcagtctttcctcagtaagtttcacttttagcactggacaagtattgatagaatacttcctatgtgtgaggcattttgtattcattctcatttaatccttccaacaatcctgcaagctaggtggtggtaccaccattctacaggaaatgggctgaaagaggtagcctgacaaaaataacataactaaaaaaaacaacaaaacaaaaataatgcaactagtaagtgctgttgtagggggtttccattgcatttttcagcctcacgccatggtagtagcttatatcatactgagtgtaagctcaatggcaaagaagtctgagctcacctcgcagttgtgggtagttgtggagagggcagcactgtggtactggctgaccctctgctacctcacattgctcccatctgatgaaggtttggttgggcaggtcattgaggtatcatggagaacctcagctcgtttgctgtttccgtaatggcctaccctacctttgacataaagaataacaattacagccaggcacagtggctcacgcctgtaatcctagcactttgggaggctgaggtgagaggattgcttgagaccaggagttcaaaaccaacctgggcaacatagcaagaccctttctcaattaaataaacaaagaataacatttataagtggcagtagagtggtcatgaaccctcttggtgtaagatttgtactcatcttcatttggagggtattgccctgtaatagatgagatggctttgtatttgccataaccatagggaaagattcagccgtgatgtataaggaactttgcactttgttttccctttaaagccactttattcctgtcagagccagaaaaaaaaattgtgattgggcttcttgtctaagatcatattttggtgacttattgtccccaaaacatttttgaatttggtgaaaacctcttttctagtgcctctgggctttattcaaaccttagtagggaaagcctagaggtctcagcccgattcctcatggggaggaaacccactgtggaaaaccatttagatgatcattttaaggaaagctttcctgtgcttacttgttcttcagttacagtttagagaaggagcctgagtgacatggatatgtctttgttcagttatttatttattaaacatttatggagcatccattctctgtcagtcattgtgccaaggtgctgtgcacacattttgtcagcatgaaatgagaaatcagtttgttgtagtcatccagaaaatgcttttccctaaatctgcatttagtcagattttatgtttttctgtatttgacatgttttgttttcttctttttagcatttctggaaaggagtccattatcgctgggcatttttcatggccagtggcccatgtttagatgacattgcagaactggtggatgcgggaaaggtacgtgcacctggaaacctggattggaagcctttgtatttctacagcacctcctgtagacctgcccactgagcctcgttagtagggactctacagaggtagcctgctcacctgaccttgtgctgccttacatggccaagtttacatgctatgtctttggttctgtctccatgggaggcatagacacagactgctccatctgcacaagagcttctctcatctagtcaaaccgccttggtttagtagatgaagaggcgggcccagggaggttataggattcccccaaagacacttggttaggtcatagcacagctgtgatctacattgggctgctaatattttatcaggtccccaggtctcctgatttctaggtgggtataataaaatcaagggcaaataaatagtccatctgagacagtcagtggccagggctagggtgagtgaggattgatggggatttgggtgaagacaactggctggtgtactctgcctactagtgtctgtcctgccgtggactctgtgggaaaggggctgttgcttatcatctggtcatcgttttttggatgtcaaaaggtctttcagggattctggggattgaaagcctcctcagctgccacctgcttatttgggtttttacatggtctaaaccaccttgacatcccatctctagaggaataacccagaaggtggtattctggtgctgatattttttatgttattgagagattatatggacttataggatggagaacttttagagggttgtgtgagatcatagatagggtgattctcattttacaggtgaaaaagccaacttgccaagaaaaaggggcatgctcaaacttgcagaaatggaaccaaaactcttgtgcttttccctctccacctttcagctgtattcttagtgcttgaagctgatttgagacttcagcatacattgtcttatctttgtcactttgcagtgggcagggactggagttagagcaggctagcattagcattgtgtgaaccactctgagacacttggacagagcccctggaggtgggctttcttattctggcccctgctccttgctggcatatttcatctttccgtttcgattttggaaaggaatatttttgggaactaatggctgctttttatgtatttaaggtttttcttctttcacagccaaggaactatataagaggatggcctgttattatttcccaaatatttgggttccaggcttatgtgtcttttcatggacttctaagttttggtgtgttctgatagggacaggggctcagtgttattgtgactgtgtaactcctcctttgtggggttctcccacatcccacaggaatgcttattttatttctaggaagaagagaatgaagtatcatcaagtaagtgcttcatgtggttggaaccctattattagagaggtctttgtcctctagaagtccacgattgtgcttgtcctgctatctgctccaggctgtccacatgcttaccactgctcttttgtattcaaaatattgtgactctctctctgcctggaaattactgtttacccaacagagatgagaggtgacttgtatatatctacctattacatttggcagataactggtaatggctaaaataggacatgataaacaacaacaaaaaaagatgtccttgaagtattctccaaggaggttgagtgagcaaatgtgccttgtgctttgattctcctctcctgcacaagctgtttgggcttgggagtcatttctggcaatgaggggttctgggactgtgaagttggtatgtggcactggatgccttgatgaggccagctctcttgtcgtgtccttgcttctgtgtggatgtgagaggtcattgcctttttatcctgggaaattagaaggaatgacacagcagatcttacttatgtgttgtgtggttggtagagatttgttaaattggaggaggacatttaaattcttccaagctttggctgagcgcttcatgattctcattagcaggtaactgttagaaaagctacagttgttttttgatcgtgaaaagctgtgaaacaacagagccaactcttttaaaatacttgaactttgaaaaaatacattcataaggttcaaaaaccctaaagatggaaaaagttatttcaagaagtcttcttttgactgctatatctcagtcactgagattctgcttgtcagatgcaaccaatattactagtttcttgggtattccaaagatactctatcaaaacaggaaaaataatttttttcctctctctctcttctttctctcctaacaaaatggataacatactgtgctgcaacctgctttttttttttttttaacagcatatgttcaaatttgttttatgtcaggatataaaagctttctcattccttttttgttaacagctacatagtatttgtatgggtgtaccataatttgtttaatttcagtcttttgcaaacagtgcttcagtggataacccaatatttatgtttagtacctaattgtatatataaccatttctgtttatggaaatggaattgctgagtcaaaagagatatgcatttataattttgatcgtttttttttttttttctttgagacagagtcttgctctgtcgccgaggctggagtgcagtggtgtgatctcagctcactgcaacctccacttcccgggtacaagcgattctcctgcctcagcctcctgagtagctgggattacaggtgcccaccaccacacctggctaatttttgtatttttagtagagatggggtttcgccctgttggctgtactggtcttgaactcctgacctcagatgatccacctgccttggcctcccaaagtgctgggattacagacatgagccactgcacttagcctttaatagatattaaaatagacagcttttgaaaatctagtatatatatttagtgtctggaatttatcttgtggcctaccttctaggccccttctctctttacttacccattatcttaccctctgaaccattttacttcattagagacttgtttttaagaatgtgaagaaggtctggttactggtcacttgtgatttaaactatctttttttttttttttttttgagacagagtcttgctctgtcgcccaggctggagtgcagtggcgcgatctcagctcactgcaagctccgcctcccgggttcacaccattctcctgcctcagccttccaagtagctgggactacaggcgcccgccaccatgcccggctaattttttgtatctttagtagagatggggtttcaccgtgttagccaggatggtttcgatttcctgacctcatgatccacccacttcagcctcccaaagtgttgggattacaggcgtgagccactgcgcccggcctaaactatcttaatatctgagctgggcgtggtggctcatgcctgtgatcccagctacttaaaagtttgaggtgggaggatcgcttgggcccaggagttcaagaccagcctgggcaacatagggcaatcccatctcaaggaaaaaaaaaaaagaatctggattaatgagtattactgatagagtctaaattctgcttgttagccctgcatgccccagtaaaaatggagaagccaccgagttaatatccacaataatgagcactctctgtcaatctgttaatagcattgtccttctaccttctttatgaacaacaaccctacctttgctttctcccagtgcagcactcagtaaatgttttggtttcctgcctttaatgtgctcactattgtcaggctcaaaagtgaagaggagctgaaatttcctaaatatgtggtgacctcacagtctgtttttcctggagatccagtcttaggcattgttttcacatgactgtcatcacgaagccttattgcaagtcgtaggactccatattcatcctatctgggcacaatttcagtttgaattttaagttacctagtattttcattatgtcttagataaagtggttggcaaactacagcctgtgggccacattcagtctgaggcctgtttttgcacatcctctgagccaagaatggtttttacttttttttttttttgagatgtagtcttgctctgtcaccatgctggagtgcagtggcacgatctcggctcactgcaacctccatctcctgggttcaagcgattcttctgcctcagcctcctgagtagctgggactacaggcgcctgccaccacgcccggctaattttttgcatttttagtagagacagggtttcaccatgttggccaggctggtctcaatctcttgacctcgtgatccacccaccttggcctcccaatgtgctgggattacaggcgtgagccaccacgcccagctggtttttatatttttaaagatttgttaaaaaaaaaaaaaagaagaagaagaagaacttagaccatgtgaagcctgcaaagcctaagacattcactatttaggcctttacagaaaaagtttgccgatccttatcttaaactagaagttaaatgttttttaactgaaacccagtcaggccaagctccagtttacagaataggcagaggaggagctgctctgctggtgaaatggtggcagggagtgacctccccgacaaatgttctttccccgcagctgctccacacagccaaggagccctgggctcttggacactagtttgcaaactgctgttctgggcattctcaaaaagaatgatttataattatccccttaagcgtactgggttggtactgacgtgcctcatgcctacagtttattggcattttctcctaagcacaaaaaacagttcctgttttcatactatttaacacacttactttttggtgggaggagatatagcaaaaattctattcaggtcacgcatatgccattgaatagcatactcacagactggaaagaggaaagctttgcacttgtctagtttactgtcttcatccctttatccctcatcctgctgtgatgtcacatttgaagggacagaggccctaagaaattaaatgatgtgttcaaggtcacataggcagggcccaggtctcttgacccttacgacagttccttctacagtcttcattgttttctgcttaaataatcatccagacattgttacctagagtttgagttcttggtattttactctgtcatcttgtatttctcagtatcttgcaggactgagaggaggtggtggtgaggcagtcttcagatgatacctgctgctaagaaggactgtgtaactgtgttttgaaggaaaatatttatacatatttgcttatatatgcatgcattagtttcctattgcagtaacaaattactatgaatgtggtggcttaagacagcacaaatttattatcttataataataagattttggtcagaagtccaaatgtatgggcagggctgcattcctcctggaagcaggctatacgggaggatctgtttccttgccttctccagcttctagaggctgtacctcccttgacttgtggctacatcactccaacctctgcttctgttaatctttgacctctaaccctcctgccttccccttataaggaccctgagattacactgggcccacttggataatccaggataatctctgcatctcaggatccttaacttaatcacaccagcaaagtccttttgccatgtaaggtgccatattcacacattttgggaatcaggatgtgaacatctttgggggccattattctgcctaccacaatgcataaaatacttcaaaaaggttatgagagcaactagaaaccttggttgctcctgaggtgggaaaccagatggctagaaatcaagtatgggaggaagatctttttttttttttttttttttttttgagacagggtctcactttgtcacccaggctggagtgtagtggtgtgatctcacctcgctgcagccttgacctcctgggctgaagtgatcctcccacctcagccccccatatagcactacccagcactacctcttggacaggaatgcccctgaccagctaaattttttgtattttttgtagagacaaggttttgccatgttgcccaagctggtcttgaactcctgagctcaggcaatctgcctgcctgggcttcccaaagtgctaagattataggtgtgagccactgcacacggccaggaagatatttttgaatgtttattgatacatgtatattcttcatctaattagtaagccttctgatgttaggagcttaatgttcacaggtatattcaaaatcttagatgccagccaagcatcttggttgaacagtgatatagatttctcagttgatttattttagccagcatcagaatagttcttatgcaccatatttgagttcaattcagaacacttactgaaggcccactatcacttacttgacccagtagatggtggagaaatgtgttggtcacactcagttaccttttgagcagcctgtcctctagaactttgtgcagtgatagagatgttctctgtctgcagtattcacttggtggccactaagccactgagcacttgaaatgtagcaagtgcaacttgagagactgactttttcattttatttacttacttttgattaacgtaaatagtcacgtgtctagaggctaccatattggacactgcagctttcgagaaaaatgtaatgagttctgaggtaggtgatttcccaggtccgtcttgaatagctgggccctcgtttagcaacgaagtacattctaaaccttaagttctttattgccactggattttgctccatagaaagaatgtagtgattagggactgaatccctaggaccactggaagagggctgccttgcctgatgtggcaagtatctcatggatcccatggcctcaatgcttctgaggtttttctgatgctactgaaattgtttctatgaggaaatttatatggggtttctcctctcaccttctggctgttggaagtgcattttttaggggtacctagggacaagtccttgatgctttcccaaatggcacacttactcccttggagagttcccccatctgccatccccctcctgtctcaccccatcttccagttttgagtttgccatctggggcaggaagtttccgagaaacagcaactgagagcaaaattcacctcttccttttgtcttctttttgtctaaaggtagactgagtttaagtccccttcttcccctttaccccaacccaggaaatactgaacctttcacagaggtcaggggcatacctgtccaggaggtagtgctggaactgcggtcctggtgcctgtccacaggtgtgtggatttggactcagaccaggagcccttaggtcttccttggtgtttgtcacctgtcagtgtcccctcacacacctcaccctctgagatctgcagcctctgtgcctggtggaagaagaggccaagggtctaggaaaagaagtggaatagactgtgacttcccagattacatccattccatgcagtaatgacattaggagtcctgggtccttgttttggctctgctattgacagctctgaccttgcacttaccactcaatcatttgcacttcagtttcctaatctatcaaaagaggcccactcggatatgttaactctactgttttgtgattctcactgggaaaacgggaattgagggaaaacctctgcctgctgccatggctgcctagacagtgtccttctccaccagcagcttcatgctcttgcagtagtgagaggttttctgtaccgtcttccgaagcctcaagtgttagagagggtttttgcctcagcaggaaggaggacttgcctagcgtcttgtaagcagcaatattccaaggccacatccagagaggttaaggttcccgtcgtccctacgttctcacagaagtgatgtcaggcagcgggtgccaaatcttggggcttggcttggttcagcctttgtatcagggatgcgaggcacaatcagcaccccacacatgaatccaagactgaatgagggctgctgctgtgagcgtccctggccggctgtgagcctcgtgtgtctgcgcagtgggaagcatggtgttgagcctgcccgctttataacagggctccctgtgccaggtggactatagcagcgtcatcacataaacatccctacttcactgtgagtaacctttctttcccccctctgtattttaactctgatccctttgtccttaacaaacaagtattctaggcctgatgtgaggctgtacatagacactgtctcattatccagttaatctctgtttgctgtcacagattcagccagcagtggcatttgcctgccttcaatttgaaacctttttttccattgtcacttacgggaattgctgaatgactcattgtgccgtggtcagccctctcgggttatttgccacaataggcctgaccagccagattaaagtgggcagtaactgtaagctgcctgtgtcatcagttcaggatctgtgtccccggtcagagctctaaattgaacattcagttcagccggttttggtttagtgccttaggaggcaggcactttgtcagtctgtggaatggatgggtatgtgcatggtacaagttagggattccaggaataaggcaaagggctgggtgagtcccactttagggtgcatacagatcactggggaagcatttttctgccccaccccctacaggttctgatgtagttgttctaacaggaggccttggactctgcattttaggcatgcattcaggtgattccttttccaggtaaacagcatcctgaaaacagcatcccaggggctttggaggagtgataggttcaggtttcatgtgggacatacaggaaacaactggtttttttttttttggagacagagtctcgctctgttgcccaggctggagtgcagtggcgcgatctcagttcactgcaacctccacctcccgggttcaagtaattctcatgcctcagcctcccgagtagctgggattacagacacacaccaccacacccagctaatttttgtatttttagtggagataggtttcaccatgttggccaggctgtctcaaactcctgacctcaggtgattcgcctgcctcggcttcccaaagtgctgggattacagatgtgagccactgcactgggccgagaaacatcaatgcattccattctgcaacattaatgcagtccaccctaaagtgggactcaccacagccctctgccttattcttggagagaatagaagacaaataggcttcgtctcacaagccagctcagagcagttaatagtggctgcagtggtgaagattctgaggtcatgctcagcttgtgggggatcagcaatagtgatgtcctccataggcgtggatggcacccgtgtagcacacatctgtcatcttggtggcctggacacagggtcgagagaccaggtcctcagctggcacaaggaaggcaggccaacatgcaggctgtgataaatccttacagtccttggctacctttcccttcctttaaggttttaggggtaggtgtagacagcagcagatgctataggaaaggctcagtgcataatggtgatagcagatgatggcatcagattgaatcctgacttgctatttatcagaagtgtgacatagggcaacttatttaactctgttccttgatttattcatctgtaaaatgggaataacagtatttaccccagaaaatggttatggggattaaatgagatgaaatctctagagcccctaaaacagtgcctggcacatagtgaggccagtatgtgccagctgttgcttttattatgagcttattgtgatttgtgggtacaaaagtattttcagctctttggagaagggaacttttggagtctaagatgctcttctggtggcttggctgtgaaattcatccaagaggaagtttcatcagatgcatctgaatgtcacgaaaacacttcttcctcttgtaaaaggaaagcgtaaaatgtatgagttggcttatgccttctgataacttatgcctgccagtggagctatgggaggcaggccactgagatacctggtggataactattgatttttgcttaaagttttgaaaaggaagaattcagttggatttttgcatggagaggatgttacctgggacctagtttcagaaggaggttgctggcattactgatagtacagtgaaaagacccagcagcattgaaacatttatgagctggctggaatgactttcttgtaaattgtaaccggctgcaccgttgtttagcaaagcctgccagggcagctccagcctgggccaagtattctcgaagcccagaaagctcacatgaggtgcgtttttcccacttaccttattagctttcacctaagtgacattgatgaagctcctactgtatgtctagcattatgcctggtgttgtgggggatgcaaacaaaatggcttagtcccctatcccacaagtactttatgctctggttgggtagatatgccaaacacttaacaaattaaaaacaaagaaaaaacaaaaaaaaaactatttccatgcactctctgtaaggagccaaatggatacatacagcaaggaccttgggatgttctctttggtatttaccacacagcacagagtggctgagatgtgtactcagctgtaacaagtacagtctgtgaggaaggccacatggttcctgtgggagttgaaagggacaacacgttgcaaactggggcatgaggacacacagtgtgagacctgggcgggaagggcagtggaattttcagagaaggatttctgggcttactgactcgtaccagcagaggcataaacataccacgtggagaaaatggcaggtagagcgtttttgcaaagcatggaatctggatgagggctgagctcaggatgctattggtcttcgaatgccggagtgggagctgttgaacggttctaagtaggagagtgaaagaccagcatggaggagaagtaagactgggcagtggggtgggaggggccataaagagagaagcagcagtgaggcaggagtggaggcagcatcatggcccttgtgagagcctgacctgggtccactggagagacacttgagagagactgtggcttgagggacaccgtcaagaaactaattagcaatgtcatctgccttgaaagatgtaggcttttttatccaccggtcaacctcttatgttttacagatccggccagttattgaacaaacctttcctttttctaaagttccagaagccttcctgaaggtggaaagaggacacgcacgaggaaagactgtaattaatgttgtttaaataaaaatgcagtttagtgattgttgacgttcttatttggtgagtgcctgtgagcccaaatttttttctagccatccctttcaaacatttttccagattagattatacattccatgatacaagctttaaaaaataaacacaccattttggccagtaattgatataaaaatatcagcacttggatttgtctgtagtcagtagaaattcgaagttttttcaagctgttccttcacactggctttgcaggttgttgtggcaccttctgttttactagcttaaactactttattgtcttttttgttttagagacagggtctcgctgtgtcacccaggctggagtgcagtggcacaatcacagctcactgcagccttgaccttaagcgattctcctgcttcagcctctcaagtaggtaggactacaggtatgcatcaccacacccagctagtttttttgtatttttagtagagacagttttgccatgttgcccaggctggtctcaaactcctgggcttaagtgatccaccatgtcagtctcccaaagttctgggattacaggcgtgaaccaccctgctgggcctgatcgtcttaatgtacaatactaaaactttcagtgtatagatggatgttggcatgaagagataatttaaagctggttccttcttgaattcatcactgagcagctttctaactgccaaggtttccttttttgttcctccaccataatgtggtcaccacagctcttaaagttctaaatctcttagtgtcatatataaaaatctgcctggtgattcatttgtttatgctcttaatattgaaaggtgagagcagagtttctaactttttaaaacccttacatcttgcataaggattaggcctgtttcggcaattgaaacatgcttctctgagggcttttccatggaaattgcagccttccaatggagcccaaagcttgccactttgatgtcaaatgtttacatttagatatctctccaatcaacccattgcagtgtgcacttcgaatattcatttacggtaagtgtttttacttcctaatatactcatcctcagtattgcacctgatatgcttgcttgtaacttttgatgtagacctgttttgagatttctgcttggtttattcctgttagacactcgtttggtagcatgtatgttagatgtaggcttttctctaaaattgttggtctggtcttactaccgagttattgcaaaagaaaaaaaaatctgattttccaggtgtaaataccagctgctcttgacttccatctggagcagcctcagctcttttcctggagggctcccaggtggtagtgggagtaaaatacttgagccaggacctcactcatcctcgtttccactcagaaactatggagtttggaaagagagtggtcagcaaatctttcttgctattataccagcacccctcaaacctgcttcatcctaatcagacatttgtttctaatctgctagctgactctctttgaagggtgagatgagggctactgaatggactctcagatttcatcaacatagttaaccagaagcaagtttatttaagagatcagttcagcacaggctactgtagaatgtcttaccccaccatattgtaatggtatgcacaaaaggcctaaaatcagagctatatatctaggaacaagacagatatgttggatgctgttgtacatgcaccaataatattttaaaacaagacaaactattccagtgaccataattgcctaccatagactccagagaagatcagcattttagaattagaaacacacttgaatagatggaaaagaaacaagctgttctacctgtgacaagagcaccagtattgagtgatgaggacaaaaagaggaagaatatattcaaggaaatgtttagcacttttgttcaaagctagaacccactgttggaagagcagcgtatgggctggtgtcttgtcagttgttaagcagtttgtttgcattttgaaatgcttactgcagttgaggattccaagattgcttgaagattgatttgactccggtcaaatcaagacttgaccagcaacatccctaaaggtctcttttccttcactttctggggataattaattgctggtcatcctcttgagcctttcacacctcgtttagtggctatagtgcccccaagacctgaggctgtccaccaacagctataccctgaagcatggctgcagaacactgcagggaaggcagccccatgcaggccatgtgtggatgcaggtggataggaggacaagaaattaggctaaaaaatctgagtttagcaaaaaagtatgtaacattgcttcagcacttgtagatgagtaaggatggctcataaattaggtcataatagtgttccagtagcagctataagaaaggcattaaacaaccctcatttgtgacattctagggcagcccatggatgagttaaaataattcaaatcctggctgggcgcagtggctcaggcctgtaatcccagcattttgggaggccgaggcgagtgaattgcttgagcccagaggttcgagatcagcctgggcaacgtgatgaaaccccatctctacaaaaaaaaaacaaaatttggctgggcttggtgatgtgtgcctatagtcccagctacttgggaggctgaggtgggaggatcacctgagcctggggaggtagaggctgcagtgagccgtgattgtgccactgcactccagcctgagatcctgtctcaaaaaataataactcaaatcctactaacaaatgttaccagactttgacattaaatttttaaaatgtattaatttttaatatgaactaaaggaaaatagtattttgtttagagttccttaaatgtgtgaatacctaaggctttcccattgtgctatgcagcatatttaaaggttccagaaagtgtttaaggccaagaaccaaaattacaggcctaataaagtatttcttctcagatgctaaacagttctctacctttcaaacttaagcctttgtcttaccctttaaagtgtaagggctttgtaggtccacaaagttggtaaatttgttccagttctctcctgtcactatctttggaaataatttaaaatgtacacagtcttgaaatcttgatataacattttacaaaatcacccaaaagctgctaattaggcaacctgtttaagcagctaccaaaaatgaaaggcaagaaatgaaaggaggacaaattattggtttaaagctatgatagtcttttgaaacgatgagtaagttctctgagtcatggcagcatgatttaaggttgaatttagaatcaatgaaggaggagtcgatccactttccagtctggtcttccatcagcattgtcctttttaagaaataaggtggctggaaggacctccagaagattcttcttccttctttgttcaggtatataggaccatggcttcccacacttgtgtaaacttctctttgctgacagtgttgaggataatgtgattttgatcatactgtgtgccccctaaaagaaaggaaaataataaaagatgaatgtacccatggtgaagggtctatagcagacacaattcccctaacaccagtacagcaaaagtaagcaagtaaacaaggtgtagaactgcatgcctcaaggaggcaaggcagggagggaagcctgggcccctgtgggatgagagggtcaacctgccatgggtgaatctgtccagatcccaccattggggcaccagcaccttcacacaggacatcccacctcacgggctcctttttctacccagttcttaagagctagtccacagtcactcttacaatgtctgaaattcaagggaactgggaaaacccgagagaagggaaaaggagtaaagagactaacatatatttggtggtgagatggtagattcgagacaccagcgaggaaagagcaggtagtcctggcagtggtggaaaggtgggaggaatggttatcgaggaacagcacttgcatgaacaatgaaaacgggctgtattaggtcaaaggggaggtttggatgacacccggaagtacataaggggacgcggtagcattgtcactactggggactcagttggtggataaaatttcatagcatttaggatgctgagtaccacagtattgtaaaactattatcatgaactctctccctgttaccagaatgtttgtaagattttccaaaggtgcttactggatgtttcagatactttagtgctaaaaacagcctcatggcttctttctttggagaagtatcattaacaaaagggttatctgatttttttttttccagtgtagaataaagatcccttcagatggcttatcctttttttagcataaacctcagcaccaaggatgtatcaacaaagaccccatcaaagtaaaaatctgtgcattttgatgcagggagtgactggtattgaaagcatgcttcctccttggatcaagaagaaataaacattcttttcacctttgaagcatttacaaaatatgaaaaaggtttgggaatttacacaataaatctaggtattatagttgaggaaggaaatcgtctcttctcttgtgagacactgatttatcatcattggtaatctacagcctctacacagctagatgtatggctagatgtactatagaatacaagggtaaggtgttttgggcctttatgtgtaagtttgtagcagtagggaaaaaactaccagcaaaccctacactctgccgagacagagacacacagcatactccactgaaatttcaggaagtattaaagtcacaatgtctcttttcattcttcattatagtatgttaaaatactttttgtattttaagagtatcttttgtattttaaaagtaaagtatcttaaaatactttcatataaattcaactagaatcatgaaaactagaaagttcttgagaaataatttgattcattctcttgcctttggagagtgtttaaattgtgcagacttcatgttttttaaagtgaacatgaatcagcttccactgttgttacaaggtatgtggtctggaataatacatgaatgtctaccaaaagaactcatttcccaaacacaagaagatgagctagaagacagatgcatgatctaataattcttagggcaattttaatagataacaaatggttcagtagttgtagctaatggaaatcatggtctgctagtaagtgcaccaacgagaagagacgtgtttatattttcctttgcatggggtgtgggacgtgcggcgctgctctctcatgtccacaagatggcaccattctcccagtctgagaaaattaaattcagtttaacaaggaattaaaactgttgtagctagccgggcgtggtggcaggcacctgtaatcccagctactcaggaggctaaggcaggagaattgcttgaacccaggaggcggaggttgcagtgagccgagatcgtgtcattgcactccagcctggacgacagagtgagactccgtctcaaaaaaaaaaaaaaaaaaaaaaaaagactgttgttgctaccgtgctagatactgagatttcacaaatatacgggacattatgcttactcagcaggcacttgagtaatttatatagtgtcatttaggaaggggctctggagctttaaaaagaagtcttaagaaacctagagtcccacggttcatgtcagagccaagacaaggagtgaggtgtccttccttctggtccgctgctaatgtaacaagtcagggacatcctgtgtgcctagcgcatctagaacgtaaactgtctgaagccaaggaggaggcttttttttttttttttcacgctggtgccctccgtgtctagcaccgagcctggcacatagtgtgtaccccgtgaatacatgttgaaagaataagagaagaaagctctagctaaggatcatagtgttgtccaccctggacataggaagcagatcacatttgtaaaaaacaggaaggtttggtcagatttcctttgagaactacataccctactttctctaacattgtgtcaaaaactccattttttccaattgagtcacatttctttggtgtctctggagattttgaaactcttgtcaacactgaagcactctagtgcaataaagtttatcaaaataagaataaacaaagatctgcataattcttaactagtttgaacctcaggttgatcatctataaaatgagtatttcacctgtctacatattgacaaatctgttgtaccaaatgtaaggtgagggagctgtactatatgttactgtttggtttctgaatattgcatttattttcttatatccaagggtactacttgcattttatatgatctttgtggtctccatccagcctgtagttgcagtgcttagtttgtgttccctaagtgccccctttaatgaaggcaaaggcattgtttgcttctgagcatctttccaacttctcagattctgtctgatcctaagtccattgttttaagtgggttggccaagctacctacctggagatcattcagaagtgacagccacttttgctccccatacagttaccaaagcccctgatgaaaatgtccagattcgttctccattatccagaaaagttgttttttaaaaatcagattacagcactttcttgtccctacaacttttttttttttgagacgaagtcttgccctgtcgcctaggctggagtgcagtggcacaatctcggctcagtgcaacgtccgcctcccgggttgacgcgattctcctgcctcagcctcccaaatagctgggactacaggcgcccaccaccacacccagctaatttttttgtattttttagtagagacggggtttcaccatgttagccaggatggtctcgatctcctgacctcgtgatccacccaccagggcctcccaaagtgctgggattacaggcgtgagccacggcacctggctctttacccctacatcataaactttaatgacagcattggcctaaatccctgattaaagtaaaattgagtcattttgtagtgatgatttaaaatagagtatgtaatatactcataaaaatttaaaaaaattaatggagtatgtagtatggttacattatcaccagttcgctacaaaacacaattgtgctgactttcctgatagggaataaaaaagtgcccattaatttaaagcagaattaccccagatgacatgaacacaccatctgcacctgtcaatagcaacacactagttcactgagttcccacacagaggttaggtcattcttatgttatttttaaatgactatcagtggttctccgggtgtgggcctcagaccagcagcattggcaacacctgggaacttgttagaaaaggaattatcaggccccaccccagacctacagactcagtctctgaggatgtggccccacagtctattttaacccgccctccaggtgattctgatgcaaataaagtttgaggacaaccacgctaaatttattctcccccaagcaccatcagttcactccctattagcttcattgaacacatgttgcattgaaatcctgtaggctgtgttaattcctttgagatcttagatcttttcaatgaaaggtcacgtgtatacatgagaatcatcaactctaccgaactaagtgcaatcacggcctttcagcttgtgatttttagcctaacactattataataaaataaatgtttgaagtcagcctatggccagattctggttcagcagttacagctgtgagattgtggccaaactggccaacccctttgagcttccggggttttgttgttgttgttgttgttgttttgtctgtaaaactggggagaaaagagggagaggggataatgtaggcctcatagggcggctgtgaagatgacgggacatggtgtactgaaagtggctagcacagcagctggcacacagtaggggctctcttactgttactactaataatacattcatcattttcaaaagttatgaatagatttttccttaactaaaagacatacacattacaataaagaaaataaaggaagtgacccttacctttaatgtctaaaactaaatttggcttcaacttgctgtaaatcctgccatcggacttcaagctccagaactggctgtcagcattctggtccagggccaggcctagcttggagccagatgttaccaggctgcccacaatcgtcaggcagcagtcttctgctatctgctcagtggaaaagaccagatatcttaaatatgtatccagctgtaagtctcatagcaattatttctctggttacattgggctttaaaattatcttagttcctagcttcatttaccccacatgaggcagttcagctcttagccaactagaatcggacaataaatatttatgccatttatttcagatgacacgaatgatgggaaaatctcaatgtttgtgcatcgtcagagacttctgccctttgcaagactatcttactagtagggaaagcctcataacattagaactgcccatcatatttttccctgtcataagtgaccatgatcccaggcaggttctgtagctatatctccctctgacatctccacctctgcttggcctgaccttccagtatatgactgcacctctaattttgtagcactgggtggctaaagggcattttatcattttaaaactcggaattgcatttattagcatttgtctttccttcatgagaattaaaattttctaaacaggcatgctttccagctatgaaaacagaaaaatgcagactcactagagggtgttttaatgcaaagattttatgagcccttccctgaagtgaatctacccttaatatataaataatgtatggcagtcatgttcacatgccattaacaaaaattactggccaggtacagtggctcacaactgtaatcccaactctttgggaggccaaggtgagaggatcacttgtgagaccctatctctacagaaaagttttaaaaattagccaggtatagtggcatgcacttgtgggccccagctactcaggaggctgaggtgggaggatcccttgagcccaggaggtcgaagctacagtgagctgtgattgcaccactacactccagcctgggcaacagagctagactctgtctcaaacacaaaaacaaaacaatgttgctataaaaatgcctgttaaaagtgtattattgtaggccaggcgcagtggcttatgcctgtaatcccagcactttgggaggccaaggcaggtggatcacgaggtcaggagatcaagaccatcctggccaacatggtgaaaccccgtctctactaaaaatacaaaaaagttagctgggcgtggtggcacacgcctgtagtcccagctactcgagaggctgaggcaggagaatcgcgtgaacccgggaggtacaggttgaagtgagccgagatagtgccactgcactccagcctggtgacagagcaagaccccgtctaaaaaaaattaaagtatattattctatattgagatgaaagcactgtgataatctaggagactttttctcattgacctattgaattcaaagttgttaaataacatcactgaaatgtctgttagaaataactgctgaaagacaccattttcttggattaagacaattcaaaggcagaaagcttcttttcatgattccatattacaactacttctgttcctcctgctagttcttctatgcatgtccaaacagtacttctgtttactgaaagaattccccctccagcacaacagacccaattaacgagttgtactccttttcgcaaggctgtgttccttctgctgactcacggggcaccaggttttttttggttttttgttttgttttgttttgtttttttaaagaaaatcaggagccaacggtcaagctcacaaaatcaaggagtaaaaaagttttatctaccatagaagcatgagcttctttcataaaaatcttactacagtcagcttttaagtgtctgttaatagtaggaatgatgcaggagggacatgggccattttctaatttacaacgtatgacacttaggaaatggactgtgcagcacacagagggatctctttacccttcatcccgttctgtggatttccccaaaacaaaccaagagtgatttttgttgacagggctggagcttatagtttgtttctgtaacagttacattaaggaaaaagggaagaataacacacttcctttttctactactatataaaaatcaagcatagaaataaatattctatcttggatcagtgctatatttacctttcattttaagttcctagactggttctatcagagctaggatatactgtcatgaaaaaaacaaattcatttctgaaagtactccaggaattgtgaaattgcatctacttgaagaaaagatcaaaagcatatgaaaggatgagtcacctcctagcaaagccatcacaggcccccgtggaatcctaaagctcaccctgcatttgatacatccttcttgatagatccaaatctgatcatcggccccgacatcctccatgacctgtatcctcagaagcttcagatcctctaagtttccattggttgacatgaataaccctgttgctttgtttcgaagtctgaaataaattcgcttctagaagacaaaacccccagcagttgttataccagatgtgctgctggaagcactgaacaagcatgaatatcaggaagaatccaaagtgagatatggattaagggtaattaccatactcaagagtctcagaggttttaaattttctcaatgagaagagtttgacaaaatgtcaaagcgcctgaggcagggtgcctgcctgtggataactgcgtttgatgttcagtttgatggccttctgaagcagccacacctcttagcaccagaaactgagcccagattattggggcagggaaggagtttatagggtgaggccagttataaactttgaataaaaaaattggataaaaagttggattgcatttacaaaaaaatttcagagaagagtctatgcagagcatggagaggaagaaaatacctgaacaaaaggtcgtagagaacctatttggcgacagccactgaattcataccaattaggtacttctgcaggtgacaataggaactgtcgccctctgtaactgccatattcataagtaacccatctgaaaacaaaaataaccacagtaagtggcaattttcatttgacagtggaccccaattacatttatttttagaatgctttccatttctagactgaactatatacttttaacatacattgggggaaaaatgatcttttctagaacacttaaaagaagtaatttcttgacaaatagcaaatttttgttacatgagtacttatgccaaaaagttccattcttgaagagaaataggtaagttttttcctccgtaaagcagtgaaatattgtcttttagtggattcctcagttcttcctgggaactattcataaaatagcttcagttgtaataatgggtctttaagttgttaatatttccaaagctcttagtaggtgctaaatagggttaaataaaaagttttgtctgcagtgagagtaatctttgttaaatctaaaaaactgctaagatactcagttcccttccgctcagatgctactgctgcacacctgaggaagtatgggtttaagcgcagactggcgtggaagcagcccagcgccctcctctcttgcatattacatcagggaagaatgcactctacttttaatcctggaacttaaatcctggataaaattttatcattttagtcatcttatcataaaaacaaaatattaaaacctactgcaaaaaaatcacccataattctaccaccctaatattctataatttttttttccaggtaggtctcactctgttgcccaggctgaagggcagtggcacgatcacagctcactgcagcctcaacctcccagactcaagtgatctcccacctcagcctcctgagtagctgggactacaggcgtgcaccaccacacccgactaatttttgtgttttcaatagagacagggtttcaacatgttgcccaggcttgtctggaactgctgggttccagtgatctgcccactttgacctcccaaagtgctagggttacagacgtgagtcactgcgcccagcttctgtgattttttttattttcttttttagatggagtttcactcttgtcacccaggctggagtgcactggtgtgatctcagctcactgcaacctccacctcctgggttcaagtgattctcctgcctcagcctcctgagtagctgggattacaggggccccaccaccacacctggctaatttttgtattttttagtagagacagggtttcaccacgttggccaggctggtcctgaactcctgacctcaggtgatccacccgctttgccctcccaaagtgctgggattacaggcaggagccactgcacccagcccggcctgattattttttaaatagatgtagtccaccccaacatctgttgtacacaggtagaccatacctattgtttttgtgaataaaagaaaaatactttcttaaaaacatgtattacattgatggtactcattcatttttatatcttattcaaaagtattcgaagttgaggggaaaaaaatctttccaagttgacctttaatcatttgtataacatctgccagtcattcccagctaaaggaaaatcccaaccctgagctccaaaa

SEQ ID NO: 9 - DNA, 110667 bp, Homo sapiens
gtggggtgcggagcgggacttggagcagccgccgccgctgccaccgcctacagagcctgccttgcgcctggtgctgccaggaagatgcggccggagcccggaggctgctgctgccgccgcacggtgcgggcgaatggctgcgtggcgaacggggaagtacggaacgggtacgtgaggagcagcgctgcagccgcagccgcagccgccgccggccaggtacgaggggcccgcgcggcggggccggggtggcggtgtggactggcggaggggcggccgggcggggcgaggtctccgggccatccgctgggcaatccgcggggcgggcgccgttcgcaggtgtgggcggcagtgtccggccgctggcccgacctccacgagcctggaggctcaaggacggctcgggggctccccacctctccgcgcctggaggtcttactcccggagctctgggttctgctcagagctccgggtacttttctctgccccattctgccagaagtgtgtgctgtccccaggggaagcgatgaggggcccttcggactccagtgggagccgcccaagggctccggagggtcccttctcaaacccctgaggttattgcttccttttaaagtcctgcagtcgtccaaagaaaaccacccatggggtccttaagaagcaaagaaaattaggcggtggtgtcagatggaaacacacccagcctctcccaaccacattctggactaccacgttcagtccccaaccaggacattggtccatagatctggcagggaatccaagctggtccctcgaaagcatcattctcttaactctgccggtggtgagactctaccccaggctccaggttggattaggtggccccttcgaccctttcctgaacacgagtgctatcacacaaggggattgtttagcctggtggtgacttgcgatgactctatactaattaaccatgctgaatcatcaaccaagttcaggcagttctaaaatattttgaaaagttctaaattcaagacaatgcttattatcaaccttacagtggtctggactgacagatattctgttgaaatgtgtttttaaagatgagctggttaaaaagatgcaagatcggtgttcctggaagagagtgttgcgataattttgcagttgactttaatacgtttaagtcttgtacagatattaaggaacgcttagaaagtactctgtttccctttagcgggagtgtgactgttgcagtttgataggatggtgatcttaatttggctttaacataactactccccagatgagtagttatgatggataggtctgttactgtttgctgcgaagcagaaaataaagcatttttccaggtcatgttgagatattgagactgagttgaggggaaaaataagtaaagcagacttgacctcccctgaagttgtaaggtgtcaaagcgaagtaatacacagatcaaaagatttgttttcacttttaaagaaataattgtgtgagggaggaagtgataacagtcagctcattataagcagtggaatagtttgtcgttttcctagcaatgtaaacgacttataagacaaaattgttgtggtatagaatgtaatagggaaatttaacgggtaggagttagaaaatacatttgcaggtgaatttcattgaggtatgattttttttttgtttttgtttttgtttttttttttcagacagttttgctcttgtcacccaggctggagtgcaatggcgcgatctcggctcactgcagcctccaccccctgggttcaagcgattctcctgccccagcctcccgagtagctgggattacaggcgcccgtcatcacgcccggctaaattttgtatttttattagagatggggtttcaccatgttggccaggttggtctcgaactcctgacctcaggtgattggcctgccttggcctccaaaagtgctgggattacaggcgcaccaggccgaggtatgattttttttgtttttttggttttttttgagatggagtctcgctctgtcgcccaggctggagtgcagtggcgcgatctcggctcactgcaagctctacctcccaggttcacgccattctcctgcctcagcctcccaagtagctgggcctacaggcacccgccaccacgcccggctaattttttgtatttttagtagatacggggtttcactgtgttagccaggatggtcttgatttcctgacctcgtgatccgcctgcctcggcctcccagagtgctgggattacgggtgtgagccactgcacctggccggtatgattttttaaaatgaaaaaggaagtcaagagaaaggtgttcacacttcagcgttgctttgtgttcaaatgcttctttcaatccctatgagttatgttcagatttagtaggaaatcaaggacctttctcccataatctctaacaatttagcatttatagaatgatatttcttcagagcttgccaactaataaggtgaagaaatatcaaggtactaacatgacattttaaaatctgtatgaataacatttggttgacttttggggacatgttttgtaaaagtttcactcaaggcacattggtggcatttggaagaacggtctgttggaatgctgtgagggctgcagtatcccttctagaaaactacttctcaccagtatttttaatacagacttcagatctggagctttctacactctcagatggaggaatattgtctgtgaatatttttctttcttatacaaaagagagatcttggtaactacatgagagcaatacaatatcttaacattttttaaaagttgttttcatttttaattaaagcgatgtgcttgtgctccaacctctacctatctttcccctctttctgggggggaaatgttgccaactgtgccatcaaaaatacgcatacagctgtgtgtcatgcttttactaaaatatgaatttagagtataacattgttgagatgtaaattcttttcctcacatctcccaccatgtcttttaatgaacaggagagaagtcagaaacgtctaggatcactttacactctcaagagtatgtttctgtgcttgaagagatgaatgaatgtgtatagtaaaagaacaactcttggatttgggtttagaatttgatgagctagatgctgtgttaaggagttatgaaacaatcacacattgctgtttagtgatgacagtagacacacagttttcacaatagtaacagttgaacaatagagcagtaatttttcctctctgctattcagatgagtgggaggagcacaaacctttatttgaggtaaggtgtggcaatttgcccgagggaaacttttacattagcattggaaagaacctttgggagtttatttaattcagtcctttatctctttgtaggagtttattaaaatcagtcttgatagaaaattctgtactgtttttaaagatctccaggggatttgcagcaagtttttctctatagcaaattggattattattccatgatcttaattaccaaatttcttcctgtggatttaacatttgatgaaataaatgccatgttttggttgcacctgaaatatagtagtttgtttgtgtgtttgtttttaaaacttcacgttaacagctctttttaaaagagcttccatttctttatagaagttttgagatttaggttttccttttactttcctgagttagttaataagtgtgaaagaaaaaaagttatctacctttgagacagttttgaccctaacttttttccctttgggtgtagttttaatgagatattagaaggatgagagctctctggcttacagaataaaaaattctatctcaaggaattggggcaaaagttgtgttcttatgttaaataataagcaaagtagaaagaacaaagtgttagtcttgcttcttaggaggaggcaaataaataactaataaagctggtttactaaatagctactagcttttgtttccactgagggagaaacagtaactgggggtttatatgtgatagttaaggaaaaggagacgatagttatgaggctagaacagtagaaatagttagaatagtcatatatctatttagatttagcagatcctgataagatacctcagatacctgaaggcttttcagaaataatgtaatttacaacttggaggacaagattttcatttcagttttcactctaaggggaagcatatcttgattcttacatagctgcatctgaagaattccagagttatttgagatactcaggaattttctttaacaggaattcttgggaaatgtgtaagcagctatgttcttaagatagtattttagaactaggatgttcagaaaagtcagacttgcccactttttagggtttgcccatgtgccatagaaatttgcaccgctttgagcaagacagttaattggttgatttaattagattcagtttttggaagaaagaagcagtgtttattggtagaataggcaattcagagggatgggtagaggcactgtttgcattctgagtgggtgtgccatacttgattaaataaatggtttgtggactcaaagtcagttcccttctgggtagtttctgagaagcttctgtaatataattcacaatttgtgaccgataaaaaagtaagtcctttgctcttgacccatttactgttagaaaatttatcttaagtttgtctttaagactactttttattgcaaagcttgaggcagctattcttccttttttaaaaaaataatttttacttctcattatagaaataatacatgtttaatgtgggatcataaaacattgagataatctctgcgttaggtttttttttttttgagacggagtctcactctgtcgcccaggctggagtgcagtggcgccatctcagttcactgcagcctccacctcccgggttcaagcgattctccagcctcagcctcctgagtagctgggattacaggcatgcgccaccacgcctggctgatttttgcatttgtagtagagacaaggtttcacagtgttggccaggctggtctcgaactcctgacctcaggtgatccacctgcctccgcctcccaaagtgctgggattacaggcgtgagccaccacgcctagccggaggtttgttttttaatgtggtctattgtaaatccatctgctactttccgttaatttcttttctttctttttttttttttttttggcgagatagggtctcgctccagcctggcctgcagtagcacagtcatagcttactgcggcctcaacttctcgggctcaagcgatcctcccatctcagcctcccaagtagctgggtccacaggtgtgcaccactacagtgggctaatttttttttttgagacagagtcttgctctgtcacccaggctggagtgcagtggcgcgatcttggctcactgcaagctctacttcccaggttcacaccattctcctgcctcagcctcccgagtagctgggactacaggtgctcaccaacacacccggctaattttttttttttttttgtatttttagtagagacagggtttccccatgttagccaggatggtctcgctctcctgaccttgtaatccgcctgcctcagtctcccaaagtgctggaattacaggcttgagccaccatgcctggcctttttttttttttttttttgtagagatgggtcttactatgttccccaggctagtctcttttttacttaaacaaacaaacaaaaataaataaaaatatatatatataaagagagagggagacagagagagagggagacagagtctcactatgttgcccaggctgatctcaaactgttgggtacaatcgatcctcctgccttggcctcctgaagtgctgagattataggtgtgagccaccgcacccagccacccaggctggtctcagactcctgaccacaagcatcctcctgcttcagcctaccaaagtgctgggattacagccactgtagcagactattttgtgataatttctaagtacagtgaaatatgcggttgtactgatactatgggtgtgatccagtcttactccaaaaaataggtattaagggctgggcacagtggctcatacctgtaatcccagcactaagggaagccaaggtgtaaggattgcttgagcccaggagttcaagatcagcctgggcaacgtggcgagaccccatctctatttaattaaaaaataataaggtatatgaccaggtaccgtggctcacgcctgtaatcccagcactttgggaagccgagatgggcggatcacttgaggtcaggagtttgagaccagcctggccaacatggtgaaaccccgtctctactaaaaatgtaaaaattagccgggtgtggtggtgtgtgcctataatcccagctactctgggagtctgaggtagtagaatcgcttgaacccaggaggtggaagttgcagtgagccaagatggtgccactgcacttcagcttgggcgacagtgagactctgtctcaacaaaacaaaacaaaacaaaacctcagttagataccatttcacaccactaggattgctaaaataataaaccaggtattaagtgttcatgaggatatagagaaattagaatcctgatacattgctggtgggattataaaatgatgcagccactttaggaaacagttaaacatagagttagcatgtggcccagtaattctactcccaagaaaaatgaaacatatgttcctgcagaaacttgtatattaattataatagcagcattgttgattgattgattgattgattcagggtgttactgttacccaggctggcaggacatggctcaccgcagcctccacctcctgggctcaatcaatcctcccacctcagcctcccaagtatctgggactgcaggcatatgccaccatgagtggcaaaatttttttttttttgagacagagtctcactccgttgcccaggctggggtgcagtgtggctcactgcaacctccaccccactggttcaagcagttctcctgcctccgccttccgagtagctgggactacaggcacatgccaccacgcccagctaattttttatatttttagtagagatggggtttcaccatgttggtcaggctggtctcagactcctgacctaagtgatccatccgcttcggacttccaaagtgctggaattacaggcgtgaaccactgtgtctagccccacgttatttataatagccaaaaagtagaaacaatccaaatgtctatcaactgatgagtagataaaatatggtatatccatataaaaggatattattcagcaatactactgaaggaatgcagtactaatacatgcaggagaatactacattgtttatggccatgtgtttatatagtgaaagtatttaaaaatacaggggaatgataaacaccaaattcccaattcttctgaggaggaaaggaaatatagcatttccccaggacagacttcttaaaaggattggagaactacttaaacatgtcagatcttgacactgtcctgatggcctcctgtcactaataacagaatacaaaatggggtttacaaggcccaccatgaactttcccatccctctctgacttcatatcctgccaggtcactgctttctagccaatccgggctttctgatgttccccaaacacattgccatcaagcacccctccctggggccttattattattattattattattattattattattattattattttgagatggagcctcaatctgtcacccaggctggagtgcagtgatgtgatctcggctcactgcaacctccgcctccaagttcaaatgattctcctgtctcagcctcccaaagtgctggaattacaggcgtgacctaccacgcctggggtccctggggctttagcctttacagttacctcagcctggaaagctttttcacagagttctcttccctactccaagtccatctgcttacaccttacctccaccctgtttaaaatgctctttttccacgattttattctgattgtagcagtgtgatctgatacagtatatctatttgcttatctgttgtctgcctctctcacaggagtgtatttctagtgctcagatcatgcctagctcatagcagggactcaataagtattgaatgaataactttaatgttttatttaatggaaaaaagatctaaagcatataagctaaatcttaagttttgataaagctagatgttgaatacagttttatttctatttttttgatgataattactgtgtcatatttcatacatactctgctggttgacaaaaactagctccctaaaataatgttacagacataagtaagaaatggattgtggtgacacataagctgttaaagaaacccgtagcctaatttatagtgtatcaggtttgcaagtggtttaaaacaatagcggtttactgaatgttcttactagcgtgaggggagagcttgtgagaagtaggaagaggccagagaaggtcctggggtctggcacactctgatatgcttcatcacctctccctaagctctccctacagggcagtggggccagtggtgacttttgcggcaccctctccattgtcttaccaagggcttcagctgtgagacgccggttggtgctacaaggaaggggaaacgtgtcagctctttcctctgctcttttctcacattgatttcaaatgccaagaagctgggctgagaaaccgggcttgtgatcctggttgtactgcagtccaccatgtgctggagagctctgcaggttgtgctaaagggtagtgtctttattgcctcctgtataagcttgacttttacataggcaagcaggttatttccaggacaactaaattagttggtgcgaaacctcatttcctagaaacccattttcttagtagaggaaacccatataaccatttgtctccatgtaagtgtagctaataacatgaataacaaaaatagctaattatttaaatagcaaaaataagtatggaagatgaatttgcagtaaaattctaatattaagccactgattattttaaaacaatcagattaagttgtagtacctctgaaataattaaaggaaaatttgattcttagaaaatctcaattcattggaaagccatggaattaataaaataaaaaaagaaaatctcaggcaatataaactaaggaatggcaaatggaaaatgtattgattggtggaaaagtaattgcggtttttgacattgaaagtaattacttttgccattacttttaatggcggaaaccatttaatggcaattacttttgcaccaacctataaataattggactctagttccaactttgatatttagctttcccatgactgttgacaaattgcttaatctactttccttgattttgtcagtcaaatgaggaggaagagacagcttgagaaacatttgtaagagaaatgcttattactttgtatgtgtttttcgtcttacatattaaatataaattcctttaggtgatattctttaaaatgatttccttacttccttttatatttacatccattttctcttaaaaaaacaaacaaacaaaatactgcacaattcttgaagacaaggattacctcttacctcttatttgtttcatgaaatatagagtacaattttttttttttttgagatgggtcttgttctatcacccaggctggagtgcagtggcgccatcatggctcactgcagcttcaaccttctgggctcaggagatcctcctatctcagcctccccagtagctgggactacattcatgcaccaccacatccggctaacttttgaaaatgttgtgtagagatagggtttcactatgttgtccaggctggttttaaactcctgggtccaagcaatcctcccgccttggcctcccaaagtgttgggattacaggcgtgagctcctgtgcccagcctagagtacagttcttgacatatagatagaaattaagtatttgtagaatgagtggaaaaaaaaatgaaatgattatgttgattttgagtttctcggtggaatagggctttggattcctagaagagactttaatgttgaaaaattatttttgtagttttgaaaatgttaaaaaattgaacatgagaaatctccacttctctgggcatgtgaaattaaagggagggatgatcaagttgtgagagattccctaggccagcagtgctgatgcaagaaggtgaacatgtagactgctgtattctgtacacacacacacacacacacacacacacacagtcccctccctcctgggaaagcaaaagttgttgttgttttttgagacagagtctcgctctgttgcccaggctggagtgcagtggcacgcggttttggctcactgcaacctttgcctcctgggttcaagcggctctcctgcctcagcctccccagtagctgggattatgggcgtgcgccaccatgcctggcaaatttttgtattttcagtagagagagggtttcaccatgttggtcaggctggtctcgaagtcctgacctcatgatcagcctgcctcggcctcccaaaatgctggaactacagacgtgagccactgcgccaggcagcagaagtttttgacgatttctagacaatgtgtgtaaagacctttagagtctaaagttaatgtttgcattttgcagtcttaggcagatacaatgaggtataaaacacctctatccaaacaactgagttggactgggctgaagatttaagtccttcagttcggtgtagtatcccaagagtgggatccgttgtatgtttgttacaggccactccctctagctttatctgctaagcactgtgagattgtgcttaatttcactttggttttctagttcaggcctccagcctggaggtgaatgtcctgtgtagaaaactggccataaatttagggctgttatgaaatttagtctgtcatgccaacccatatagctgtcataagttctgctggtttttctttctcttgatggagttctgcctatggcaagccccagttatcatcactcacgctaaagctctacaagtaccacaagtagagagaggaaatggctggcactttcagctcacctagagaggcctcttctccctctggaattttaattctgctagtcctctttgctatgcatagaagacagctcttcaatctttaaagccatttatttatttgaataatctatttagttttatctagttgttactgtgaaagcactagcttgcctctctctattaaagctaacctggaagtctcattattttttgaatttttgttgccacaaacatgacataagaataagtttgttctgggccaggcatggtggcttatgcctgcaattccagcactttggaaggccaaactgggaggattccttgaggccaggagttcaagaccagcctgggcaacatagggaaacctcatctaaaaaaaaaaaaaaattaaccaggtatggtggcgggcacttgtatagtctcagctactctggaggctgaagtgagaggattacatgagcccaggagtttgaggttacagtgagctatggttacgccactctactccagcttgggcagcaacagagtgagaccctgtctctttaaaataaataaataggccaaatgtttaaagtagaaagtcaaagtggccagccattccactacaagataaccagtgttttcagtttgatttatagctttccagattagcatgtgtgtgcatgactttgtcattttaccttttttttttttttttttttgagaaagagtcttgcttttttgcccaggccggaatgtggttgcaggatcttgactcaccgcaacctccgcctcccaggttcaagcaattctcctgcctcagcctcccgagtagctgggattacaggcatgcaccaccacgcccggctaattttgtatttttagtagaaatggggtttctccatgttggtcaggctggtctcaaactcctgacctcaggtgatccgcccgccttggcctcccaaagtgctagtattacaggtgtgagccaccgcatctggccgggaaatattttttaaaaatttcttgaagcccttaaagtttacaggctctgctaacatgataaatacccaataaaaatatagaaaagaaattctaagagattttaatatagaatcattatctgttaactgttttagttgagagcaacagaaactgagtctggttaaactaagcaaagagtgatttattggaaggatgataggtatacaaaaatgggatgggggatgaaattgaacaagtctcagaaaggcaggaattggcacagctcttgggacctcagtggcaggagtttgtgaaccctttcttcaggacattggagacccactgcccttcagactctctccccattgacattttaaatccccataaaagagggttgttggatttctttcggcagaggtgtctgtgctgcatcaatcagttatggtccaggaaatatagtcacaacaaagcatacacgtgaccaccaggggcgcatccctgcatatcagggagtattcccagagaagggaagttgacacaaaccggattgcctctccagtggtgtgcaccacaaaaccagactggagcacgtggtgggggcagagtggagggaatggtattacaggctcagaacgtgtcagcagtggaggagaactcagatgaagatgcagaatttgtggcagagctgcacttgtactccagtcttcaggctcttgcatctcttacaccgtgatgcttatctagagatggaaaagtgttacagcggaggcttgggtggccagtgtgataactcctgggcagacatcagtgcccagtgtgtacaggatgccactgaactgaaatggaaatgttccactccatatatgcttgaagatctccttttgggggttttcaatagcaaaatggtaatgtcaaaatataaatgtgtttcacagctagttttggaaacatttttcattccattccacatgagatacttactgacaaaaactaaggaatttatgctgcctacacgaaaaactatggacttctacttttcagaatttccctgctgaaaaaaggagacacttctggacatacacattcagagcacagtatagcctatgtgatttgtgtaaagctccaaactgttctctctagtatgtgtgatatgcagtagggagaggccagtacatttcagtaaaattgcaaggacagtttcagcagaactgattttaaggagcaacagaaacatagcacttgaaaatgaatagggttcgtttaatggacaaagcatgataacagttctttgattgctgaagaataatgggtggttcacattagacattaagtttttaaaaataaagttccaaaccattcaccagctgggcaggttctgttatcctgctgtagcatgcagctggaatgtgcttatttgcttaaggaaattatgcttttgtgattttgtattcatatcagaaatgtgtgcttctgtttcctaataattacttcactgttattggattataacatagttactccctgtcctttcatgggattcttgaaacctttattcaggatcatttcttctgagtcagtttacagtgcaataaaaactgttttattttaattatttttaaaaaattttcctgaaacttaagagacagaaggcaacatataatccagggttttcttttgctatagaggatatcattaggacgtttgacaaaatctgaataaacttgtagactaggctgggcacagtggctcatgcctgtaatcccagcagtttgagagaccaaggcaggaggatagcttgagcccaggagtttgagaccagcctgggcaatgtagtgaaatcccatctctacaataaatcagtaaatatttattgtattaatcttatgttatcttatgttaatctcttattgtgctgtggtcccagcttcctgggaggctgaggccggaggatcacttaagcctgaaaggtagaggctgcagtaagccatgatcacaccactgcactccatcctgggtggcagagtgagatgctgtcaatagaaaaaaaaaaaaaaaagaaacaaaccttttcaacctccttaaaattctctcgtgccccacaggaagctcttggactaaagcacagaaagtcattactaattctatctggaagccagaaaataaggtggagccaaagatgactccaaacttgggagactgggtagactggatggtgatgctgttgaccaaaataggtaatagaagaggagtatcaggttttaactgagagggagggttaggatggtgagaagaagttcagctttagacttgttgagtttgaggtgcccatgaagtctaagtggagctatgtagaaggcaggtggaaatgcgaatgtggagttctggaaaggaatttgggattgcagtgtagacttgagcttacttgtagcatctgaggtctagctgagaactcctaagtagatgagaattcactagagaggctatagataggcaagtttaaagagaagggtagagacacggagaagggggttggggagcagccaaagcaggcgtccccgcagttgacttgccaccaagggaatgtgggtgaatgaccaaggcaggcgtccccatggagatcagacaccaaaggaacgtgggtgaataatcagagaggcatccctgcaatgattaaacaccaagggaaggctgccttcccgagtccgtgaccggcaccggagttttgggtccacggataaaatgtgtctcctttgtctctatcagaaaatgaaaggaattgaaattaagagaagggagagattgaagggtggcgccaagattgaaaggagaaagaggttgagggatagtgagagaggttggagaaaagagtaaaaagaggccgcttacccgatttaaaatcggtgagatgttccttgggctggttggtctgaggacctgaggttgtaggtagatctcttcacgaagtgaggatgaggacaggggactggtctcccgaaggagtcccgctgaccctggtctttggcaccaaatgtttcacgtgtgcatgtgaagagacccccccaaacaggctttgtgtgagcaacaaggctgtttatttcacctgggtgctagtgggctgagtccaaaaaaggagtcagcaaagggcgggaattatcattagttcttataggttttgggataggcggtggagttaggagcaatgttttgcaggcagcgggtggatctcacaaagtacattgtcaagggtggggagaattataaagaaccttcttaagggtgggggagattacaaagtacattgatcggttagggtggggcagaaacaaatcacaatgatggaatgtcatcagttaaggctattttcatttcttttgtggatcttcagttgcttcaggccagctagatgtatacgtgcaggtcactggggatatgatggcttagcttgggctcagaggcctgacaatatatactcgtaaaaaacaagaaaagaaaaatcaaagcagtttagaaggttataaacaaaaaatatgccatcttgtcccaccctactccttaccacattttcttgtgtctccttcgagacaattttagtcttatggaaacatatgtattacacatatggcttatcttttattatactttcccattattgctttggttaggagtgccttttcagctgcttaataaacatggttgacagcccacaggcatgtggacaaaatggcccattagattgattttttttccttctcttgttctgtaatgtgttttatgatggtgtgcttatagtcttgtcggaaaaaaatttcttcctttgcatttttattttcttttacattttcttaaacagtaatattactgttcaagcaaacatttcttgatattcctaaatctttccttgattaataatgctaatatagtgtcacattcttgtttgcttaatgtgaacagactgtgaacagactgatacgaaatgttattaagtgttaactatttattaagacttcataaatactaccctgggtgctagacgtgcaataatgagcaaaacagacctggtgtttttcctcatggattattacctatgtataagagagtaataccattattgtttgaatcatgtgaaagataagatttagcatcagttcttaaaggtgaagtgattttgttctctcagagtttaaagacttttcaccttggagaggctcgcgtgtcagttggcgtgcccatctgcctccctgtatcatcagtcactctgttttgacagaagccacattccaaagtcacttcttttcacaggttctgaaggtggaaaaaaagaaaccccagccacttcctagttgaacctaaattctttaaaatacatttaattttgaataaggctttggtaaaatcacacagttcttcataatggtttagcatcctccttcctagagagtccagcctacagtatgaattgacctgatcctgcctgtgtgggtgtgcctgaaatcaaggcggatatctttaaaagagacccacccatagcattcctgacctgtaaactcgctgcatgttggattgagactgcggtgggggggctctgtaatttccaggctttttaatgatgtgtacagttgagagtaaatagtttaaataatttcatagttagggagagttcagcactggtattaaacagagttcttaaggcaaaatattttcagatacagttcttaaagagatgatcagaatgttaatttttcttgtcttttaaattgcttttcattttgctttgcccagcttaataacttttttatattgttatgttgttaatttttaaacaattttctgccttaagatattggctcaattttaggtattctgttctaaacacattacagtcttactcccatttaaaagtttaagtattaaatattgacaccaaactttttctgctgtgtggaagagattgatgaagacccaaatgagtttgtgaatagttttcagaagttatttagatcatcaagttgaatcagtaccaacagattccatccatcttccatgcctatctgaatgcctgtcctttgtcacatacaactgtgtctttccgaactattccagtctgtaacactgaagcagctttccaaaactaacattacggggataggatattctaaaatatctttaccccttggatatgtataacaattgattgtatagttatgtaaattttattaatttgtttttatttgtttatatcgtatctctgatcagattgcctgagagggcaagaaaggatcttttagttctttgggaccttttgtaatgcttaattgacgatatgcccctggtaaattttgtttaaccatcctcactgcagttgttccaaagttaagattaaagttaacacacaaacttgtctagcagatatcttctataaagcaagatttccattaaaattgaccaagaagcaaaaagttttcatctatgagatcaaaagtaaagtagcttggtttttgtgtattaaaatccaagtatcccaaaggttaaaacaagggataatcttacgatgtttgggaatgaatacttaagatgaagggggacagaaaaattcatgtcagttactaacaatttttccccttgttttgggtttcactttctttttacttttatataatgctgggccacactttttttttttttttctgtatcacctaggctgtagggaagtggcatgatcatggctcactgccatctcgaccttctgggctcaggtgatcctcccacctatctcctgaggacctgggactacaggcatgtgccaccatgtccagctagtgtttttgttttttgtttttgtagaggcaagattttgccatgtgcccaggctggtctcaaactcctgggctcaagttatctgcccaccttggcctcccaaagtgctaggattacaggcatgcgccactgcacccagcctggaccacacttatataaacatcttagttttttgcatgatttacttgtgttatcactaccaacaaaggttaatttgaactacgtgtttctgcaggggcctactgctgataattatttggaatactatggctgggtggctttaagaatgtgtggtagtaaaacatttacaaatattttacattctaataaagctgaatttacttttgaacttttgatctcttcatctgtaggccaatatagtacttttttgggacaggctttctctttgttgatttatattttttgctttttttattagaacaaaagaaattatgctagcattttagaatctatttaagaaaatcaaataatgataaaaatcagtgttaggtggtgttcttatgcagtccttcttgctccccttcttttactgttcatctgaagggcatataatttataagttatttctattgaaaacaagtagccctgcttatctcttagtgttagatttgactgttgcttacaaaattctttttttttttttttttgagatggggtttcgctcttatttcccaggctggagtgcaatggcttgatctcggctccccacaacttccatctccaaggttcaagcaattctcctgcctcagcctcctgaatagctgagattataggcatgcgccaccacacccacctagttttgtatttttagtagagatgggttttctccatgtgatcaggctgggcttgaactcccaacctcaggtgattcgtccgcctcggcctcccaaagtgctgggattataggcgtgagccaccgtgcctggcctaaaattcttttttttttttttcttgtttccagtgaggttggaacttagaaaattcctttttttttttgacacggagtcttgctctgtcacccaggcaggagtgcagtggcgtgatcttggcttactgcagcctccacttcccagattcaagcaactctcctccctcagcctcccaagtagctgggattagaggtgtgcaccaccaatcctggctaatatttgcatttttagtagagacaggtttcaccatgttgaccaggctggtcttgaactcctgacctcaagtgatctgcccgcctcagcctcccaaagtgctgggattacaggtgtgagccagtgcgcccggcggaacttagaaaattcttaaggtataattcagcaaatctctaaggacctagattttaggtaggaatgtttttcttgccatgatggaaataaacatttttaacctctcttttagatccatcatgttacacaaaatggaggactatataaaagaccgtttaatgaagcttttgaagaaacaccaatgctggttgctgtgctcacgtatgtggggtatggcgtactcaccctctttggatatcttcgagatttcttgaggtattggagaattgaaaagtgtcaccatgcaacagaaagagaagaacaaaaggtaactgttagagagtttttgattctgtaaatagaagccttttatggaaatcttagtatttttgcacaaaagctttttctcagaaatttgggtacacattaaaattaaactattccagatgcagttaaatgaaaacattctacaaagaaagctgaaaaataacaaggttaaagatatcaaagcattcatcatgggtttaatcaagaagaacctaaggaggtgggcggcactatccctgttttatggattagaaatcaaaaagtcacaagttaaacaacgtttcccaagatgccaggtgtcagagctgctgtgtggacagaggactgtgaagtgaaaaagccttgctctttctgttcataccagcatgctgaatcccaggttgtgtttaccattttctgaaaaggttgtattctttggaattaataatgtgttttctcatagatacattatacatagttgggtgattcacacatcagctcctctccccagacaaacaagctgtaatacagaatgtggccaaccgattctatttacggtaaacaacactcttgttttaggaatggcaaacatatgagcatggttgtctggggaagagggcttcttcattcacttcacttttctctgcatgttcctttgtacctctgaagggttttttgtttgtttgtttgtttgtttattttttgagacagagtctcgctttgtcaacccaggctggagtgcagtggtgcgatctcggctcactgcaagctctgcctcctgggttcacaccattcttctgcctcagcctcccaagtagctgggactacaggcacctgccaccacgcccggctaattttttttttttttttgagacaagtcttgctctgtcgcccaggctggagtgcagtggctcggtctcggctcactgcaagctccgcctcccgggttcacaccattctctggcctcagcctccccagtatctgggactacaggtgcctgccaccgtgcccggctaattttttttgtgtttttagtagagacggggttttactgtgttagccaggatggtctcaatctcctgaccttgtgatccacccacctcggcctcccaaagtgctgggattacaggtgtgaaccactgtgcctggccagtttttttgttttttttacttgttattgacttgaagctcacttctggagttgtatacattacatatgtgttacctagtctccataaataaataaaatgagggttaaagatgcctaattttactaaaaataaaacaaacctgtgtgttcttggcatgtcccacatggcaaaaggttgtcttttagcccaggcaaatgtaccagattagagaaggacttaagacattagagtttttttgtggttcctgtgcgtccgaggaaaagaggcaggtgtggggtgagcaaagtcaacgctgagacgagccagtgaacattgattgtagaagaaacaattattcaggtaatggatagtggtcatgtgcaaatgggaagagtatatcacgaaaacattgtcagttactaggaagacaaaaccagtcagtagatacatggattcaaaagtggctcctgggagaactcaagattaggcatcctttctctctcatctcaaccatcttgtactccatccgagccccagcacaagttggccatcctactcattgccctgcaagttaatttcacaaagaaggtaaataagttttttgaatgcaaagccctgcattcagaagttggtccagtaaccctaagtaatttttatcttttaaaacccaaacacatttttaacattttttattttattatcattattttttagacaagagtctcgctcagtcacccaggctggagtacagtggtgtgatctcggctcactgcaacctccgcctcccgggtccaagcaattctcatgcctcagcttcccaagtagcagggagtacaggcatgtgctaccactcccgagataattttgtatttttagtagaaacgaggtttcaccatgttggccaggctgttctcaaactccttgacctcaaacgatccacctgcctcggcctcccaaagtgctgggattacagatgcgagccactgtgcctggcccacatttttaatacgttttgatcccccttctccccctgagcatgtccactcagagtgcatctacagtacgttgattttgtatagccctcagtgacagcttaccatacccttcctaggttgtacagtattgtagttacttgttcacaggcctgtatcctcctactagactgagttgatggcagttatgaccgatggtagctgaagttttatttaaatattcaaactaaaaactctttatctgcagggacctctcctagtgtagatgcatagtcgaaacttgataattgacgtgtattgctggtggtgagggaagtgctgattgtggtgcagacagcacattcctggatgaggggatagtataggcaaaggcatgaagaatgtttgggagaatctggaatgtagacagaagagaaattgtgttttgaaaatcaaagtaagaagtttggtaggcaatgaggagtattgtttttgtttttgtttttaaatagagacagcgtctcgccatgttgcccaggctggtctcaaactcctgtgctcaagcgatcctcctgccttggcctcccaaagtgttgggattataggagtgagccaccatgaccccaagggcagtttttgatcaggggatttttcatacagcttgtgcagctggtgctcaaagtgtgatgaatgaatgaaaccaacaagatgtatctgaattactttgtgagtacattatctttggaacttgtttcatgtttacagaaagtaaattggtggtttaagtgttgggagctgcctgtgtatcctttgtgtgaaagaattagaacacacagattttattcttaagtagtttctaattttgttgaggaaacaaacatttgaaagttatgggcctttgcaaaaccattatacaagtaaataatacttagattatatgaagatatagaacaaaaaaagtatctgagtagcatagggttaatcaggaaacaattcttggaggaagtaatacaaggaaatgggaggctgaggagagcatttgcctctgcagtttatggagaggattttattaaattattcaaattcatttcaatagaatattcccagtagataacattagcatttaaaacagccaacttctgccattttcttacaaaaattcagcttttagagggaaaggaaaagtcattcctttcctgtgatagatcatgtttgttttctaatgttggattagagatggggaaagagggaggcaaattaagtgttaaactggaaggaggtgagggaaagtggttgcttgggatcataaaatgcaaacataatgttgctacttcctcatttcactgagagagtggtattcataaccacatcctggttttcttcctcatttcattataaaagagagcccagtttaactgtgttaattctttgatgtaaggaaataccgtatgttgctttgaatacaactaaatcacatgatcataccaataaagatgagttaccatgagtttgttctattttatatacattgcataaaattcttggaattctttaccccttaatcctctgttattcgtggtgttttggatgagaatgttgtttttctcaatctatggattatttctttgtgatgtgaggtgaagctagtagttcagaaacacgtacgtgacagatacagcaaaagcttgaattaataaagatgttctaggctgaggcaggaggatcactcaaggccaggagtttgagaccagctgacacaacataatgaaacctcatctctacaaaatgaaaaaatttaattcagaaaaaaatattctaatatttagataggaaatagctaggaacgtaaggagtaaattatggtaggtagttaccacacactgacaaaattttaaactaacattttgcctccacagcttgttcatgatcagatatttaaaaacgggaggaccaaataccacattctcacttattttttaatttttttaattttttttttttttgagatggagtctcactctgtcgcccaggctggagtacagtggcgtgatctcggctcactgcaatctccgcctccacggttcaagtgattctcttgcctcagcctcccaagtagctggaattacagtcatgcaccaccacgcccagctaattttttgtatttttagtagatacaaggtttcaccatgttggccagcctggtctcaaactcctgacctcagcctgccttggcctcccaaagtgctgggattacaggagtgagccaccgtgcctagcctgttctcacttataagtgggagctaaatgatgagaacatatggatacaaagaggaaaatgacacttgtggtgggtaggaagagggagaggattagaaaaaataacccattgggtgctaggcttagtacctgggtgacaaaataatctgtacaacaagccattgtgatgcgagtttacctgcacaacctgcacacgtacccctgaacctaaaataaaagttacaaaaaataagtagattaaaaatgggagggataggatacggcgaagggacattatatgtttatatcccaataggcttattttcaagatacaaaagaaagaaagaaattcaaatacattactaggaattcccagagggattttattcttggcctccttcaaaaagtagcgtacagccgggtgcgatggctcacacctataatcccagcactttgggaggccgaggtgggtggatcacctgaggtcaggagttcaagaccagcctggccaacgtgatgaaaccccatctctactaaaaatacaaaaattagccaggcgtggtggtgggcacctgtaatcccagctacttgggaggctgaggcaggagaatggcttgaacctgggaggcggaagttgcagtaagctgagatcttgtcacagcactccagcctgggcaatagagactgtctcaaaataaaaaaaaaaaagtagcgtactaagaatattctggtacctgtcattttggtgcattaagctaggggattgattgtttggtttgtcttctttaattctgtgtatgattctacatttaaaaagaacacaactggctgggcacggcggctcacgtctataatcctagcactttgggaggccaaggcgggcggatcacctgaagtcaggagttgagaccagcctgaccaacatggtgaaacccggtctctactaaaaatacaagaattatctggggcgtggtggcacatgcctgtaatccctgctacttgggaggctgaggcacgagaatcacttgaaccagagaggtggaggttgcagtgagccaagatcacaccattgcactccagcctgggcaacaagagagaaactccgtctaaaaataaatacatacatacatacatacatacatacatacatacatacagaagagcactacttagctcccccagaatcatctgaacctgggaggtggaagttgcagtgagctaagattgcaccactgcactccaccctggacaatggagcgagattgtctaaaaaaaataagaagaataaaaaataaagagcactgtatttcattgttttgtgttagttgctgggcacaggacagcagtagtctttttaaataattgacatatcataaaggttacctatttaaagtgtacgatacaatggtttttagtatatctacagagttgtgcagccagcaccacaatttaattttgtaatgtttttctcttctgaaaaagaaaccatgaaccattagcagtcactccttcctcatccaccctccccaccctcggcagccactaatctactttctgtctctgtagatttactattcgggacttttcatataaatggatgtttcatgtaaatgggatcatacagtgtatgttcttctgtgtctggctcctttcacttggcgtaatgtatttgaagttcatgttgtagcatgtatcggtacttcattgcttcctattgctgaataatatttcatcatatggagcagtcatctctacttactatagggatttctcactggtaaaaaactatactcaaaataaacctttcaaagaagctttgtgtagtaggtttaccactgtatctgtttggactagtggcagtaggtttacctctgtatccgtttggactagtgccagtgttaggtttgcaagagtttccctgttacctgttttccctgtttttcatgccaggaaagcttttccttcaaatagtcccatggctagttccctcacttccattttatcctctgttctacccagggcaccccagctaatttgcagcatgtctccccctttcctttttgcttttgtttctgttggtatttgtcactgtctaacatactttatttatttttatttttatttatttttattttcttgagacagtgtcttgctctgttgcccaggctggagtgcaatggcgcgatctcggcttactgcaacttctgtctcccaggttcaagcaattctcctgcctcagcctccagagtggctgggactacaggcatgtgcaaccacacctaatttttgtgtttttagtagagacagggctttgccatgttggccaggctggtcttgaactcctgggctcatgtttatctatctgcccacctcggcctcccaaagtgctgggattacaggcgtgagccactgagcctggactagcaaactttgtattttatatgtttatctcttccaccagaatacaaattccaagagggcaaggattattacctttttgtttactactctgtactatagagtgcttggcacatattagacgctcggtaaatgtttaagatacaaggccagaggccaggcgtgttagctcacacctgtaatttcaagcactttgggaggctgaggtgggaagatagcttgagcgcaggagtttgagaccaacctgagcaatgtaacaagaccctgtctcaacaagaaaattaaaaaattagctgggtgtggtggcctacacccatagtcttagctacttgggagactgaggtgggaggatcacttgtacctaggagttcaaggctgctgtgagctgtgattgagccactgcactctagcctgggtgacagagtgaaaccttgtcttttttttttttttttttgagacagggtcttgctctatcatccaggctggagtgcaatcgcatgatctcagctcactgcagtctctgccttctgggttcaagtgattctcatgcctcagcctcctgagtagctgggactgcaggcgtgcaccaccacgcccagctaattttttgtatttgtgtgtgtgtgtgtgtgtgtgtgtgtggagacggactctcgctctgtcgcccaggatggagtgcaatggcgcaatcttggcttactgcaacctctgcctcccgggcttaagcgattcttctgcctcagtctcccaagtagctgggattacaggcatctgccataacacctggctaatttttgtatttttagtagagacagggtttcaccatgttggccaggctggtcttgaactcctaaccttaggtaatctgcccacctcgacctcccaaagtactgggattacaggcatgagccaccgtgcctggccattatctctaaaaaaaaaaaaaaaagtttaagatatgaatggtattgtgagtggtggtaacagtaacaatgtaaagtattttgaagtatttgtagtcgaggtaggtgtgtacgtacacacatgcacacacaaacatacaaatgactgttttagatgtaggaaaaaccagtgtttttttatcttgaaatctcattctgcgctttcatggacagcatagaaacagcaaggaagtggcttcctgtttttaacattaaaaacaggaaaggacagacggtggtatgacctatatgaacagtaaggaaagtcgttaattaaccatggttgaaaggtttaaaagttgtagtctgaaaacctttcattgagtatttcacctacttttcttcattaagtagagataaaaacagaattattggtttataaaatacttttagaatttataatgctttccttttccctttttcttttctttctttgtgtgtttttttttttttttttttttttttttttttttgagacaaggtcttactctgtcacccaggctgaagtgcagtggcacaatctcagctcactgcagcctcgacctccctgtgctcaggtgatcctcccacctcagcctccggagttgctggaactacaggcacgtaccaccatgccctgctaatttttgtgttttgttgtagagactgggttttgcccccaggctgatcttgaacttctgggcttaagtgatccgcctgcctcagcctcctaaagtgctgggattataggcatgagccactgtgcctgggccagattttttttttttcttttcagagacaggatcttgctctgttgcccagggttgagtgcagtggcacaatctcagctcgctgcaacctttgcctcccacgctccagtgattctcccacctcagcttcttgagtagctgggactagaggcgcacgctaccacaactggctaatttttgtttttttttttttgtagagacagggtttcgccttgttgcccaggttgatcttgaactcctgagctcaagcgatccacctgccttggcctcccaaaatcctgggattataggcatccaccactgcgtccaactataatgaattttaactgtgtgatgactccattttcaacacttcctcaggtgggaattatttgggatttaaaaattcttaatttaagttttgaaacaactttgtcatgtttcagttacttctaaatctatctcataaggctatttccttctttagtagaaaatacattttccagctgggtgtggtggctcataccaataatcccagcagtttgggagactgaggcaggaggattgtttgaggttaggagtttagactggcgtgggcaacagagagagatcttgtctctacaaaaaatttaaaaattagccaagcatggtggtgtgcacctgtatgtagtcctggctacttgagaggctgaggtggggagatagcttgagtccaagaatttgaggctgcagtgagctatgatcatgccacttctctccagcctgggttacagagtgagacactgtttctaacaataacaacaacaacaacaacaaatgttgcccaaataaaaattcaaaacgttatagattttttttttactatcttgtctttgatatgcaatattatgtttataatgaaatgtcttgaaatcttttagtagtactatcataccagcaaacagcattagttattattattattattattattattattattttgagacagagttttgctcttgtcgcccaggctggagtgcagtggtgcgatctcggttcactgcaacctccacctcccaggttcaagagatcagccttccgagtagctgggattacaggtgcctgccaccacacccggttaattttttgtatttatagtagagacgggtttcgccatgttggccaggctggtctcgaactcctgacctcaggtgatccacctgcctcagcctcccaaagtgctgggattacaggcatgagccactgtgtctggccttccttcattttaataataatggatattgaggcttttttcatttcttgtcagtgatgaataaaactactataaatgttctgatatatgcatttcctgcatgtaaatatgagtttctccagggttggaattattgagttatagagttatagagtatgcatgtcttcagtttcactagatagtgccaaattgttttccaaagttattgtactggtttgtacacctaccggctgtgtttgagaattcttttttttttgagactgagtctcgttctgtcacccaggctggaggagtgcagtggcgtgatctcagctcactgcaagctccgcctcctgggttcacgccattcttctgcctcagcctcccgagtagctgggactacaggcgcccgctaccacgcccagctaattttgtttttgtatttttagtacagacgggtttcactgtgttagccaggatggtcttgatctcctgacctcgtgatctgcctgcctcggcctcccaaagtgctgggattacaggtgtgagccactgcgcccggccaagaattgttccacatctctttactaacactcagtattgccagaatttaaaatttttgccagttcaattggtatatatgtactagtgtctcattgtggttttaatttgcaattctctattgcccagtgaagctgaacagctttttatatgtttaatgaccattggaagtgctgatttcatgaagtctctgttcaaatcttttgtccgtttttctactgggtttgtgtatttttctaagtggtttttaggaaatatttatgtatcctacaagtattttgcgtctaccatccctcttttgtggcttgtctttcgcttagcatagtgttttcaagattcatgtaccattgtagcaagtaacagtacttcattcctatatcactgtatactattctgttatgtggatataccacattttgttaccaccttttggctgttgtgaatagtgcttctatgaacattcacatacaagtacttgttcgagtatctgtttccaattggtacgtacctaagaatggaattgctgggtcacatggaaagtctatatttacctttaaaaaaattattttttggctgggtgtgatggctcacacctgtaatcccaacactttgggaggccaaggtgggtggatcgcttgaggtcaggagtttgacaccagcctggtcaacatggtgaaaccccgtctctactgaaaatacaaaaattagcgggatatggtggtgcacacctgtaatcccaactacttgagaggctgaggtacgagaattgcttgaacccaggaggcgaatgttgcagtgagtctagattgcgtcactgcactccagcctgggtaacagagcaagactccatctcaaaaaaaaaaaaaaagaaaaaagaaaaaatttatcacgttcatcgttgtcaaagtctacatgtacctttgagaaaccaacacacttttccaccttggctgtgccattttgcatgtccaccaggaatgtattaaggtttttctgagtcttatagttttatattttacgtttagggctatgctccttttgagttaattgtataaggtatgaggtttaggtcgggtcatttttttggccagtggatgtcctagtgagaaagtttttaaaataagtatggcatttaaaagtaatctgtgaaggtctaaatactttatagttttgtagatttaaatttttctcccacgttttcctttacttagcaagttttgaataaaagtaaagctgaaataaatttgttccttaaagactgctagagttggtttacttgtcccagttttttttccctgcactggatgcataggtcaagggtcgaactttaaatcatcctgaccttgagaagacactgagacagttctaagcatgttttccaagctttttatcctaacatcaaagcagtgattgtttgcctcaaatgctcatgtttgagagaaattttgtcttttgttatatcgagattggtgccccagactctaaaataagtaaaagttattaaattagaactgacattgagaattcttaatggaattagtagtaacactaccactaatagtgttagtttggaataatactagtctcagttttggctttgtcactgcattgttatgtgacttggacaaagaatttaaattttattcagtgactctgtaaaatacatctaataagttattaaacatctatttctcaacaataattataatgaccacgttgttgaaatcgtcacattattggtagagttaccaaaaacactgtaggtcattcaagccaacagagaattaggcatttatggctttgtggaggggcgagagcagtgaggttagggcctccctcccctaactgggcagctaccccaaactaggaaactgctcctgccgtgagtactctgagtgctggcatcacaactgtcgcactgccagaggctggtgaataggcagtggcacatagaatcgcgctggtgccgacccagcactgaggtctgcaggggcttgcctcctacgctggtgcaaagcgtggcccctgccatccagctgttgtatgtgcttctcactggcagaccctacatcacatccgcaacccgatcacaagggtgtccaggaaatacagtttttagccttccatctcctaagtgtgtgtgtgtgtgtctgtgtgtcttgtagggggtttgttatgtgtgtgttggtcatatgcagaacataggaaaagaatgggaaggacaatagcacagtggtcttgaagtgctttgaacgctatcaaagtatttcagattgatttagtagcatcaccaaataagaggcagtgtggcattggggttgggagcacagagtaaagttagaaggcctggatcatcagttcctggctctgcctctggctgctttcctaagtgggaaagccatttagcctttctgaaagtgtaagaaatatcttccttaagagtgtgcagagtatgtatatttacatacttacatatataagtatataaatatgtgtgcatgtaaagcacttggcaagtgcctggtatgtcataaatactcagtagatgggcactcttgctgctgttgtgattattcatcatctttatcatcatcatgtaaacatatttgactatctgtgttggaccagaatgatgcttaacaaagggacagttgttagaaagtggacttcaaaaagtgatagcatccagctttgccccctgtgttcttaatgcctgtataggtgctacaataggtggtacttatgtatattatattaaacaatatgggatattttctagaaggcttaccttaaataggcttaaccagtaaaggatatttattggcttcttattgagatgtccctagactacttttgataaggtcttcattgatctctaagcagcaaatccaagagtttgagttgttctcttgagttgagaaggctcttaagtgaggagtatttcaagcccagtgatccagcatttagtcgcgagtaggtattgttttccctctccttacatgtgctaggatatgggatttgtgaggatcttcaggaagaatgtttatgagtatatccttaaggctgcttggacttgactttaccattgtcactcccttatcagttaggtattcgctccttctctggacaaacactcttttatagtacttattatattgtatttatttgtgtgtttctccactacactaagagttcttagggagtgtagaggttgttcttactcatttttattcccagtgcccagtttagtgcctggaaggtactgctcagtaaatgttcaataactgagtattaggtcaatgatgatgagtattacataagccttaactaaagtcacttcacagtgaccaaactgaggaggaggaagagagtggtggagatgggggaatgagggtcggaatagtggggctatcactctttgcggagagaactgtcttgttctttaacgtatcctgaaagtctggcatacaacccagtatgtatcgagtactcactaagatatatttgaatgaatgaatgaaaagattacccccctagtttaactgtggtcttagagtgtttaaagttaacctgatatttttggaaatacactcccattgcctagaactggaactgcaagtagtgacccctcccctcctttttttcatggctaagctgcagggagtttggtttgctgcccttctcatcttttttaaaattattatttttatttatttatttatttatttatttatttatttatttattgagacagcttttcactctattgcccaggctaaagtgcagtggtccgatcttggctcactacagccccaaccttctgagctcaagtgatctgtccacctcagcctcccacgttgctgggactgcaggcacatgccaccacacctggctaatttttgtattttttgtagtgacagagtttcactacattgcccaggctggtctcaaactcctgggctcaagcgatccacccgccttgagcccaaagtgctgggattacggcgtgagccactgcgcccagccatgcctatcaaatctttctgctgaacctactgactgagatcagagctactaccctggagcttagctaaggagtaaaggggagctgagatttcggccgtaagtccctctctcctaccattctatgccacccgcttttggtccctaacatccctggttgtgacagcttctcctcctttaccctgtgctactgtgacttaatcacttgttaaggagagatggaaatgcctgaccatggcaggcacaattctttgttcaggaaattggaacccattgcttccttcctaatcccagacagctgtgcctctggttttctttgtttagcccaaggctgaggggtgaagctctacttcattctggcctgcagtcttttttctatcttggggtttgataatccctctggtatttggagcagactctaaggtttttctgttttatatagtaaaacaaaaaatattgcttttgttgctaataaaaatttgtctgtaaggaaatatttctcttaatattggagttaatactttgaacattaatgtgcagtgtttagaaagattataaagaaatgagattggccgggcgccatagctcatgcctgtaatctcagcactttgggaggctgaggcaggcagatcctttgaggtcaggagttcaagaccagcctgaccaacatggtgaaacactgtctctgctaaaaaatacaaaaattagccaggtgtggtggcgggcacttgtaatctcagctacttgggaggctgagacaggagaatcacttgaacctaggaggcggaggttgcagtgagccgagatcacaccattgcactccagcctgggtgacagagtgagactctgtctcaaaaaaaaatttttttttttaattaaaaaaaagaaatgagataatcagtactgtcatttccttcattagaagcgttagtactgttacccttttttacatgaatgaaaaggattgaagactactttttgttttttcctttgggaaataaatgcatggataataacagccaaataaaaagttttaattagaattggatatctctattcctattttcattcaaccagtatacttgttggaaggctatcaaaatggacatgccatttaaatgaaaaatttccaattgtgatagacatgttatttatgaatattttctgtcctgaggaaaattaactattagaaccagttgtaaaagagatggtggctgggcatggtggctcacacctttaatcccagcactttgggaggccgaggtgggtggatcgcctgaggtcaggagtttgagagcaacctggccaacatagtgaaaccccgtctttaataaaaatacaaaaaattagctgggcatggtggcagagtcctgtaatcccagctacttgggaggctgaggcaggagagtcgcttgaacctgggaggcagaggttgcagtgaggcgagatcacaccattacactccagcctgggcaacaagagtgaaactctgcctcaaaaaaaaaaaaaaaaaaaaaagagagatggtatcaggtactgcaaattcttagagtagcttctgactttgctcagccttatttataagatttatctactgggaggctcattcaataggcacttgagagtccggtgtcatagaaagttgttaattttagagttgtatgcagccttctttagcaatgaaaatcttttacagaataaggcttaagctttttcaatgtttttgactgatttagttaacagcttaatttatattggcaccaagcccagatctaatggttataaactcagtagttggctgatacagtaaaaactgtagtttcgttttcttgttgtttggtttaccctttacattcaagagtttaagtagatctcatatggtctggtcacatgtgttctgagtagtggtcataccacaccaggcatagcatttctgctccgctgtgacttgattttttacagacttaagttttagtacaacttaatctctcagaggaagggttaagttcctgagcataggaattcattttgggaatgtattttcttttctttctttttaaaaatttatttgtagagacagagtcccactatgttgcccaggctggtcttgaactcctgggctcaagtgatcttcccgccttagcctcccaagtgttgggactacaggcatgaaccactgtgtcctgccttcttttctttttgagacaggttctcgctctgttgcacagactggagtgcagtggtgtagtcatagcttactgtcacttcagattcctggccacaagcgatccttccaccttagcttcccgaagtgttggggttacaggcatgaaccattgtacctggcctctttttttttttttttttttcttttttaaaaaattcctttctaaagggaaaagaacctaaggtgggtggcttcctataaccatttttttttttttttgatatggagtctcattctgttgcccaggctggagtgcagtgaccacggcccactgcaacctctgcctcccaggttcaagcgattctgctgcctcaagcctcccgagtagctggaattacaggcacccgccaccatgcccagctaatttttgtatttttagtggcgatgggtttcgccatgttggccaggctggtcttgaactcctgagacttcaagtgatcttcccacccacccacctcggcctcccaaagtgctgggattacaggtgtgagctaccacacccggcccctatatcctattttatagtgtttcttgtttattattttctctttggatttgtttcattttgatccttgaaaatatgcaaaggatggaatcttaattttggaattgtttttcttggttgaaattggaattatgtggtttttatggcatttcccctaatctattaatgtgggaggaggcttgtggggagggaagagccgtctttttgagattattagggagggaaaccatttaatgacagaattgtatgactacattttatttttatgaggactactttgttaatttacattcttgtgctctacattcatgaagtcagttatttgaaaccatgtaatatatgtcaactattaaagttaagtgacttttatctgataagagttgtgttaaaataatcatagagaattgatgcctttccagatgttttcctgatacatcagggttttttttgttgttgtttttgctgttatccagcttggagtacagtggtgccatcatagctcactgcagccccaatctactgggcacaagggatctccctgcctcagcctcccgagtagctgggactacaggtgcactgcacctggctaatttttaaaatgtttttgttgagacagagtctcgctatgttgcccaggcttgtcccgaactcctgagctcaagcagtcctcctgcattggctttctaaagtcctgggattacagacgtgagccaccaagcctgtcctgatttagcagttaattaaatataagtggcctctcattctcaggtgctcttacagtatgaaaatggaagttgtaaagtttgtttttaaagtaactcagtggaatgatagacagtggagacttggaagggtgagggagtgagggtggatgatgagaaattacttaatgggtaccatgtgtgttatttgaatgactgataccgtaaaatccctgacttgtccattacacaatcttgcacgtaatgaaattgcccttataccccataaatttacataaataaaagatcatgtcatctgttaaaaaattttttaataaagtaactcagttaaatttatggtatgtcaccatttcttggcaggactttgtgtcattgtatcaagattttgaaaacttttatacaaggaatctgtacatgaggataagagacaactggaatcggccaatctgtagtgtgcctggagccagggtggacatcatggagagacagtctcatgattataactggtccttcaagtgagtcttggttgggaaattatttgacaacaattacaaaagggtttcttcatttgagaaaatatgttattataaattgagtattctctcaaaataggagtagcagctgaggatacaatatgattggtttccttacatattcttcattgttgagctttttaagatatatctttctattacatttgatactgtgttggattatagttcagaagaaaatttggcttatttattttttgagatggagtttcgctctgtcacccaggctggagtgcagtggcgtgatctcagctcactgcaacctccgcctcccaggttcaagcaattctcatgcctcagcctcccgagtagctgggactacaggcatgcaccgccacacccagctaatttttgtatttgttttagtagagatggggtttcaccatgttggccaggctggtctcgaatgcctgacctcaagtgatctgtccccctcagcctcccaaagtgctgggattacaggcatgagtcaccgcgcccagcctggcttctttatttttaaaaataactcctattgataagaaacagtatacaaaagtttagtctgttttatttttggtcttgactttaaaaaaaaaaaaaaagaaaagctatcctttccattatgccacttatcagaatcaagtatccaaatttatttctggatattttgatttctcaaatgatttaaggatgatatgtagagtgtttttacttacatggattgaatagtttggaaaactttttgtatttttaacattgtatttgtttgtttgtttacttattcatttatttgagtcagagtctcgctttgttgcccaggctggagtgcagtgtcacaatcttagcccactgcaacctccacctcccaagttcaagtgattctcccaccttagcctctctggtagctgggactacagagatgcaccaccatgctcagctactttttgtatttttagtagagatgaggtttcaccatgttggccaggctggtctcgaactcctggcctcaagtgatctgcccaccttggcctcccaaagtgtcagagtcttgctctgtcacccaggctggagtgcagtggcaccatcttggcttactgcaagctctgcctcctgggttcacgccattctcctgcctcagcctcccgagtagctgggactacaggctcctgccaccacacccggctaattttttgtgttttttagtagagacagggtttcactgtgttagtcaggatggtctcaatctcctgaccttgtgatccacccaccgcggcctcccaaagtgctgggattacaggcgtgagccaccgtgcccggcctacagcttgccttcttagcttggtcaaatatcagtgacaccccttctcatgtgtatattcacagcaagtttattatttgtagtgactacattgtattttacagtatacatgtgccatggtgtgacatgttgggctgtgttaataatctcaaaatctcagggaattaaaacagtaacagtttatccttatcgatacttcatgttcatcctaggttggtggggcccttgaaccattttgtccttagttaggggcccaggctgcctcagcttccattgtatgaaatgtcactggtctctgtatctgaagaacagatgtggcaaattgtgcagtggctctcaaaggatcctcatgtgtatatattctcatgtgcgggagttactgagtatgtatatcttttaatggataagtactgccaaactgccctccaaaaaacaaacctgatattcttatgtacagtgtcctgtaagataaggtgattgtcctggccaacactggatatcattagttttaaaatctttatcactattaataaatgaaaattgattattttaacttctatttccataattggtagtgtgtttgagatttttttaatatagactttgttctctctgcttccttttgtgtcaccagttcatttaatattacatgtaagtacttttttgctcatgagtttcattgttttatgctattgatgcacaggtatacagggaatataataaagggtgttataaacatgggttcctacaactatcttggatttgcacggaatactggatcatgtcaagaagcagccgccaaagtccttgaggagtatggagctggagtgtgcagtactcggcaggaaattggtaagtgaaagctgtatttggccagctgctgtttttgacattgttttagtcaggggcaaataatagtaatattgacctagagtattaaatatctacactttgtcatgtcatttagataaggtgaagaatgctttgtttttctgaagtgtgatggatgatttcaatgctttcaacacattttgagatgtgtttatctttcccaatgtgttatacatatagaatgtccctcgaaaaatcctgccagtgtttgtttcatttataactttaatgttgatttcattggcttttgcaaatgttagtggttaagagtgccacttattaggatgttgggcatatgagagttaatctgctttcatactggtacatgggggctaataataattcctgccttatagagctcttttaagaattacgtaagctaatccatgtagagtacttggaacatagtagacaataaatataaactctttttattattgttttaagtttgtaaaatataaaagagtaataactttatataaagagattcaatttattttaattcagcggaagatttcagattgttccaatttgattcagagaactgacaaccctggaagttatgaaaactttccaaatacttattactgtaagcacagtagattaaaagaacagttcattgttagttatttctcagggttctagggattggcaagcacagttgggtgcttcttacccaaggttcctctcacggttgcactcagtggtggctgtatggctggagacatgaagccttcttcattcgcatgtttcacctaggctgcggtggctggagctctgtgtggcctctccatgtttctagcttgggtttcttcataccatggtggtcttggagagttgttcatcatgcatggctgcaggcctctagagcaagcatgcaaagatacctgactgaagccaggcacggaggctcatgcctataatcccagcactttgtgaggccaagataggaagatcagctgaggccaggagttcgagaccagtctgagcaacatggtgagacctgttctctaaaaaaataaagataaagtagccgaacgtggtggcgcatgcttgtgatcctagccattcaggaggctgaggccagagcatccctcgagccaaggagtttgaggctgcagtgagctatgatcgtgctactgcaccctagcccatgacagagtgagacactgtgtcaaaaaacaaaaacaaggatacccagttgaaagttggaaggctttttatgccctagctgtacaggtcccaaagtatcatttatgcctcttctattggccaaagcgtcgctaaggtcagcccagattcaagggttgtggggattgccctcctccacctccaaatgggaagaataacaaagaatttgcatccatatttaatcttccatagcaactctgtcagctcacgaaatttaaaacaacatgaagacagggaaaaaaataaaattgtgcagatttttatatctatttatttagatagctagatacatggatatatagatagattgatgcatagatggatgcagggtctctgttgcccaggctggagtgcggtggtgcagtcagctcacttcagcctcaaacttcggtactccagccatcctcccacctcagcctcctaagtagttaggactataggtgcacgccaccatgcccagctgattttttaatgtgatttttgtagagatggggatctctttcaagaggctatgttgcccagggtgttcttgaaatcctggcctcaagtgattctcctaactcagccttccagaacactgggattataggtgtgagtcaccatgcctggccccaccatctaattttaaatattttcattcctcctaaaagaaatgctatactcagtagcattcattggatactgtttcccttccccctacaagtccttggcaaccagtagtctactttttgtctttatagatttgcctattttggacattaaatataaaaggaattgtataacatttggtcttttctgtctggcttccttcactagcacaatattttcaaattcatccatgttgtagcctgtaacagcactccattcttttctatgactgaataataatcctttgtgtgagggtgccacgtcttgtttatccacttatcacttgatggtcatttgggttgtttctactttttggctattgtcagcagtgctgctgtgaacgtgggtgtacaagtttttgtatgatatatttttgtttctcttgggtttatacttactagtggaattgctaggtcgtatggtaactctgtgtttgactttttgaggaattgctaaactgttttccaaagagaccgtactgttttacaatctctccatcgatgtatgagggttcctattcatttttatatcatcttccagtcatcttgtttgtagcccaactttaacccttgattactttgctacctgttccctctggtttttaagcttctctagggttccatacagtgaatttacttggttttcaaaggattccactctataagggcatagatatgaccttcttctaactctgtcattttccagttgtattagtttcctgtggctgctgtaacaaaatatcagaacagagtgacttaaaacaacaaaaatgtctagtctcataattctgtgggttataagtttggggtctaggtgtcagcagggccatgctgtctgatgctctggagaaaccttcctagcttctggtgtcgacagcaatccatgacgttccctggcttatagcacatcactccaccacacggctgtcttcctgtgtgtcaaacattgtcgtcttctggccgggcacagtggctcatgcctgtcatctcagcactttgggaggccaaggcgggcagatcacttgaggtcaggagttcaagaccagcctagccaacatggtgaaaccctgtctttactggaaatacaaacattagctgggcgtgatggaaggtgcacgcctgtaatcccagccactcgggaggctgaggcacgagaatctcttgaacctgtgaggcagaagttgcagtgagccgagatcacaccactgcactccacctgggcaacagagtgagactctgtctcaagaaaaacaaaaaaacagcattgtcttctgtattccttctgtgcatgtctatcactgtgtccaaatttcccctttctataaagacattagcatccccctaatggcctcattttatttatttatttatttatttatttatttatttttaaaatctttgtaaaaattttttattgatacataacatttgtacatttgtgtggggtacatgtgatgtgttgttacatgtatagaatgtgtatagaatcaagtcaaggtatttagggtactcgtcaccccaagcatttattatttctatatgttgggatcatcaagtcctctcgtctagctatttgaaatatacaatacattgtttttaactatagtcaccctactctgctatcaaacattagaacttatttcttctaactctatatttgtacccatttaccagcttttcttcatctcccccgctccccctacctcatctcaacacacatccttccagtattgttttactcgctacctccatgagattaaatttagtgaggaaggcatgttaaaagctgacataggccaaaagcgaggcctcttacaccaagcaattagccaagttgtgaatgcaaaaaaagttctcgaagaaaattaaaagtgctactccagtgaacccacaaattataagaaagtgaaacagccttttattgctggtagagagaaagttttagtggtctggataaaagatcaaagcagccacaacattcccttaaacccaaatctaatccagaagaagatcctaatcgcttcaattctatcaaggctgaaagaggtaaggaagctgcagaagaaaagcttaagcctagcagaagttcattcatgaagcttaaggaaagaagccatccccacaacataaaagtgcaaggtgaagcagtgaatgctgataacttcagcaagttatccagaagatctagctaaaataattgatgaaggtggctacaataaatcacagattttcaatgtagatgaaacagctttaaattgaaagaagacaccatctaaaactttcacagctagagacaagtcaatgcctggtttcaaagcttcaaaagacaggttgaccctacttttaggtgctaattttaagttgaaaccaatgaatgacctcattttaatttgattacctctggaaagttccagtttccaaagaaggtcacattcttctgggaatgaggacgtcaaaatatcttttttggtgggacacaatggaacccgtagcatcatccttctgtatattttccattttcattaattgtgttcagaattacagatgtccactaattaataaaaaattgagcttttagcttttatttcttggttatccagttgttttgtgatgattttcaagaggaagatgggagtagaacatttttatttccccctgcctttaaaacagagtttctaactggcactccagaaatgacaagccttgtgatctaatcctgtggttaaaggagcattgtgcagtggcgacatatagtaaggatacattatgcctttatggcatttgatattttataaagtgctcggctggatgcggtggctcacgcctgtaatcccaacactttgggaggccaaggtgggtggatctcttgaggtcaggagtttgagaccagcctggccagcatggtgaaacctgtctctactaaaaatacaaaatagtcaggcgtggtggtccgcacctgtaatcccggctacttgggaggctgaagcaggagaattgcttgaacccaggaggtggaggttgcagtgagctgagattgcgccactgcactccagcctgggcgacagtgcgagactctctctctcaaaaaaagaaaaaaagctcaaacgtattatctcttttgatcctcacaacaatgtcatgaggtagatagggcaaattattattgctatttagaagtatttagcccagagagttcctaagggctttgattaagcaagccttaaggacacatggcatccaagtttagcattcttctttcccgcatcttttctctctgtaatgtcatttagtccttaaagatttgagtaccaatataaaattgcggtacaaatttaccagtcagttcacagtgagggaagaaccttttttttttttttttttgagtcagagtctcgctctgttgcctaggctggagtgcagtggtgcgatctcagctcactgcaacctctgcctcccaggttcaagcgattctcctgcctcagcccccgagtagctgggattacaggcacacgccaccatgcctggctaatttttgtattttgagtagagacaaggtttcaccatgttgccaggctggtctcaaactcctgaccttaggtgatccgccctccttggcctcccaaagtgctggaattacaggcgtgagccactgcaccctgccaggaagaaacgtttttacctatcttttgctgtataacaaaccatctcaaaacttagtggtttaaaacagcaacagatttatttgctcatgattctgcaatttagggagggcctgatgttatcttagctccatgtggtattggataggcaattatgactgtgtacagggtatccaagatgtcttaactcacgtttgacacttcagctgggtggcaggaagggctaagggctggctgggcatctctgtttctctttctctctgtctccccctctccttacgtctttctctcctccttccatagtctcttatccctcagttcccatccccccgcccatgttctgtttttgcaacaggccagttagattgttttacatagcagctgacttcaaaagtgtaaaagcagattttgctaggcctcctaaggcctagacctggaactagtatgcacaaacaggaatgggagaaatttttcgcagccccctttggggaaattccactgcaggtgctgaatcagattttattcaactattgtgttctttatgagcacatattactcttcacaatattatgaagaatattactcttcataatattgactccttcatagatcttagtctgaaaaggacacaacacatatactatgatttcttttaataaagtgatgagtaattcttaaattcaggattttgtgatactgactttattaacttcttcacacaggaaacctggacaagcatgaagaactagaggagcttgtagcaaggttcttaggagtagaagctgctatggcgtatggcatgggatttgcaacgaattcaatgaacattcctgctcttgttggcaaagtaagatactctgtcatttatgaaaactccctcatgtatatcttcttttgttttgaaaagcagtcagagtgagctaaaagctgttataaactttaggctaaacatagtttagccaaagatatttctaccacaaattgtttttcttttttttttttttttttgagatggagtcttgttctttcgcccaggctggagtgcagtggcaccatctcagctcactgcagcctctgtctcttggattcaagcgattctcctgcctcagcctcccaagtagctgggactacagctgtgtgccaccacgcctggctaattttttgtatttttagcagaggcggggtttcaccatgttggccagcctgggcaacatagtgaggcctcgtctcaatttgattttattttttaaattaaaaacaatttgtggccaggcgcagtggctcacacctgtaatcccagtgctttgggaggctgaggcaggtggatcacctgaggtcaggagtttgagaccagcctgtgtttatatatttatatacatatatataatattgtatattatatatatatataacatatatgtatgttacatattatatatattacatattacatattatatatataatatatatatccccaagtgggtagtgtgtgtgagagggcacaatctgtatgtaaatgtaaattatatttcagcagattggtactctcatcctgaaaggccccttgaggttatttattctcatgtttaacatgacacttaggaatggtatattgaaaacgtggtggattaactcaagcaggagaattgagtttttgttttttggttgtttatatggtcacacttagctgtgtgactgtgagcatgtcaaataatctttctgatcctccaagtttcttttgtaaaatgaggtggttgagctagattaactctaaagtcctttttagttatgcagtgtatgggtctgtaaggtacagatgggacaaatagaaaacaaacagcaagataggagatttaaacccacctgtgttgataaacattaaatataaatggtttgtacattccaatgagaagacaaagattgtcggataaaattaagtaggtttcctaatgtaaaatagcaacctattttaaatatgaagacacagaggttaaaaggaaaaggatagaaaaaaaatacagcatgcaaataataatcagaagaaatgtgaagtgcctgtattaatataaacaaagatttcagagcaagaaatatttctggtgataaagaacattgtgtaatgattaaggaattaattcatcaagaggttataattttaaatgtgtaggtgcttatcccatttatgcctaatgttccattattggaacgctaagcatgtgggagttatttatatcctactgctcaaggtcatcgccagggtctgattttgcaattcaaaaaattgtaacctctggcataaatgggttattaacagagcgtcaaagtacgtgaagcagaaattgatgaaactaaaagaagtagacaaatagaaaattgtaattagagacattaacccctctctcttttttttttttttttttgagacagagtctcgctctcttgcccaggctggagtgcagtggtgtgatttcggctcactgcaagctctgcctcccgggttcacgccattctcctgcctcagcctcttgagtagctgggactacaggcgcccaccaccacacctggctaatattttgtatttttagtacagacggggtttcaccgtgttagccaagatggtcttgatctcctgacctcatgatctgcctgcctcggcctcccaaagtgctgggattacaggcgtgagccactgtgccctgccctaacccctctctcttaattaacagaagaatgaaacagaaaatcagtaatgatatagaatgtttggaaaacactgtcaaccagttgacctaattgagagtcatgaaacacttcactcaacaacagcaaaacatttactaccaaagaccatattctaggccattaagccagttttggtaaatttgaaagtattaaaattattcaaagtatgttctgtgatcacagtggaatttaaattagaaattgataacacaaagatatctggaaaacctttgaatatttgaaaattaaacaatatatttctaaataacccatgggccaaagaagaaaaaacaggggaaaataaacatattttgaactaaatggaaatgtaacctattatagtttgttggatgaagctaaagcaatgctcagatggaaatgtatagcattaaacgtttatacaggttgagcattcctaatcccaaaatctgaaatctaaaatgtttcaaactcgtaaatattttgagtgtcatcatgacagctcaaagaaaatgcttaggggtgctaaaccagtaaatataatgcaaataatccaaaatccataaaaatctgaactctgaaacacatctggtcccaagcattttgaataaggaatattcaacctgtattagaaaaaaagtaaagcagccagactccatcttaaaaaaaaaaagtaaagcttgtagcttaaaaaattagaaaaagaaaaacaaattaaacccaaactaagcagaaggaagaatataatgatgataaatgcaaaaattaatgaattagaaaatagacaataggaaaattagtgaaaccaaagctgattctttgagaaaatgaatatagttgataaatctgtggccagaatggtcaggataagaagagataaggtgcatattaccagtaacaggaatgagagagggggacatcactacacgtcctatggacattaaaggataataagggagtattaagaacaacttcatgccaaaatattcaacaacttagataaaatacacaaaattccttgtaagacataaatgtatggttctttgacttcacgttataatacgttgctgtcctgcattttgaagtacaagcctgagattcttatttgttagaatttttaacactagaggattagaaaatctcatcttgctcttctctctgtatgcttacaagctctatcagaggattatctagaattagacgttttctacacagacctggaagatacaaccataaggatttatattccagggccgggcgcagtggctcacgcctgtaatcccagcactttgggaggctgagacgggtggagatcgagaccatcctggctaacaggatgaaaccttgtctctactaaaaatacaacaaattagccgggcgtggtggcgggtgcctgtagtcccagctactctggaggctgaggcaggagaatggcgtgaacccgggaggcggagctggcagtgagccgagatcgggccactgcactccagcctgggggacagagcgagactccgtctcaaaaaaaaaagatttatattccaaatcaaactataattgaaatattattaaatattgtttaatctgttaaagacagtaacttatccagttttaatgatcctttgaatctgatactgaatttccatgtgaggtggttaattgctcagtttgatggcagggtggggcagtatattgattaagagcataggttctggaagcagacacttgtcttatttaataattattttgtggccgggcgcggtggctcacgcctgtaatcccaggactttgggaggccgaggcgggtggaacacgaggtcaggagatcgagaccatcctggctaacacggtgaaaccccgtctctactaaaaatataaaaattaggcgtagtggcaggcgcctgtggtcccagctactcgggaggctgaggcaggagaatggcgtgaacccgggaggcggagcttgcagtgagccgagattgcgccgatgcactccagcctgggcaataattagtattgctattattattttgttactgtgcttgtgaccttgagcaagattctaaactcctgaacaagagtgtcctcatatgtaaagtgggagtgataatagtgtctgctacatagaattattgtgaggattaatagtaataatgcttttaaatcttttaacatgatacctgaaacattaagcgcttagatgttaactgctagtatgaataccttttatttttgaaccaaagatttaataaagcttaagaataagttctaagggaaaaagacagattgatacattgaaatgctgaataaggctgtctaaaaaaggctgtctaaaaagagttcctttttgccagaaaaaaagaacataatgcttttgcaggtttgccagaaaaatatttagctggaaagagaagaaaataaaattttgtgcggaggggaagggaagggagggttctttttaagatagagttgaatgccaagagtggtaagtaaagaatttgacttgctgaagagaaatctgacttctctttattttctcccccagtttcgctttttcaattttaacacttttttgaaactttaatttagacttacaaaaagagttacaaaagagtacagagagttcctgtataccattcattcagcttccctttatgttaacatcttgcataacagtggaactgtttcttacagctaagaaattaactgtgacacaatactataactaaagtacaggacgtatttggttttcaccagtttttccgcttcaggatccaggtgaggatccacattgtctttagctgttgtagctcctcagtctcctccaatctgggatagttcctgtttttctttgtctttcatgaccttaatacttctgaagggtactggtcccttattttgtagaatgtctccaatttgggtctgtctgttgtgttgttatggtttgattgagtccgtgcgttattgagaaagctaccacagaagtgataccattctcagtgaatcatgcgagagactatgtggttttgatacatattactgatgatgtaaatcttaatcgcttgtctcaggtgtcagcggggattttctactaccaacttactgcttttctctttgtaatcaccatatattgtggcagagatactttgggactgtatatagcattttggattaaactttcacccactaactttagtatgcatctgtgatcttgcctgtggcagttattaccttggtgttcttttttttttttttttttttttttttgagatggagttttgctcttgttgccctggctggagtgcagtggcgccatctcagctcattgcaacctctgcttcctgggttcaagcaattctcctgcctcagcctcctgagtagctgggattacaggcacccaccaccatgcccggctaattttttgtatttcttagtagagatggggtttcaccacgttggccaggctggtctcaaactcctgacctcaggtgatccagccacctcagcctcccaaagtgctgggattacaggcgtgagccaccgcacccggcttaccttggtgttctaatggtgatttttctatttttctcattctttctatacttactaattagaatttttgtgtaaggaagagttcttgcttctcccttatttatttctgtcgttgtgggtttgtgaatatttttattatttggcttataattcaacacaattgcttcttttttgttgctcgagttttagttttggccattgggagctgcttcaggtgggtacctgtgtcctttgaatatataataactttttttttttaaagcattcttatactttctggcatgataaaatgctccaggatcatcttatattttccctatcccagttttggaattaaccagttctccaagaagtgctggttcttttttttggagaatgatatttagaaaccaaggtctgggaactaggtgtgtttattgctgaaggagtatcactgcttctcacctctcagtgactagagctagaaaatgtatgtatatatgcgaactcatgcatacacacacatctgtgtgtgtgtgtgtgtgtgtgtgtgtgtgtgtgtgtgtgtgtgtgtgtgtatgcatgcataaagatttgaaagccaggagtctattgatactgccggctctagtcttctccttttccttattctccttcttctccttctcctccttctcctcctcttcctccttttcctcctcttcctcctcttcctcctcctcctccttttttttttttttttccccccagacagagtctccctctgttgcccaggctggagtgcagcagcacaatttcggctcactgcctcactgcctcagccttttgtgtagcagagatttgaggcgcctgccaccacgcccagctaatttttttgtgttttctttttagtagagatggggttttgccatgttggccaggctggtctcgaactcctgacctcaagtgatccacccaccttggcctcccaaattgccaggattacaggcatgagccaccatgcctggccacttcatttttaatctgtacatttttaaccaggtagcttttttatcttaataaatactatgtgcataataaaaatttcaaacacaactactgttacaagtttcttaagtattcctttaagaatattctgtaataaataagcatgtatatatatagttgacccttgaacaacatggtttgaaccatgcaggtccacttacacgtggatttttttcaaccaaatatggagcagaaatacagttttcagccaggcacagtgtctcacacctgtaatcttggcacttcgggacgctgaggcgggtggatcacctgaggtcaggggttcaagaccagcctggccaacatggtgaaaccccatctctactaaaaatacaaatattagctgggcctggtggtgggctcctgtaatcccagctagctgggacgctgaggcaggagaatcgcttgaatctgggaggcagaggttgcaagtgaaccaagatcgcaccactgcactccagcaacaagagcaagactccatctcacacacacacatacacacaatatagtattcatggaacacaaaacccaagtatatggagggcctgcaggtcccacagggccaactgcaggacatgagcatggatggatttggataaatgtgagggtgaggcagttctggaaccaagtcctcctgtagactgagggatgactgtgtgtctttgtatcttctctcttctttttattctcgtgggagcatgctatatactttctgcacccttttcatctaattggatattatgaggctatttttgacagagaaaaacctttttctgagttgagatctgacaggttgaagggccccctgagagatggaagagtaagaactgcagtgaaaaaaaaaaccaaaccgagatcttcaaccttttcttagttgccttagcagaaactgatgtttgtgtgttaaagcaaagcttgtttggggatttttaagacaaaactgaagcctacagtccatgctatgtggggaaaaagttaataagtaggatcttccctggactctggatatgagtagtagtgagagaatgcaccatttccacagacatgaccccatcagctgccatttcccacagataaacagaacatgatactaaaactacatggaattctctcacgtaaagaaaccaaaacgttttagagacggatgtgtcatgttttagatacaaataaagacctgttgccatatatctgagtatttacatcagtcatgggactgaagatattaaattaaaaggctagaattttgcatctacttttaaggtgtctttacaaaaaacaaatgatcgtgtacacctttttcctcttcttaaaattgatcactgtgctgttgtgcacaatttccttaataagatacagctattagtgtttgtggcattttgtgatttgtgtaactaaccctttcccctccagcttcttacctttctgttcctgtgatgttgcagggttgcctgattctgagtgatgaactgaatcatgcatcactggttctgggagccagactgtcaggagcaaccattagaatcttcaaacacaacagtgagtttgctgaagaattcactgctggccttggttttgctattctttcgatccatggtgggagttaacattagttatattagcacttgaaagtataaatgaagacaaagtagcaacatttaaaatgttcttccggtccagtcttttaaaattagaggttgatggaagcctcttgtacaaatataatactatccttttatttgaccatgaagttttccatcccatttccttgtttacagatccgttactcaaatacatttactcgatgactatagtgtatcttgccataagactaacagtatttaagtgaataaatcaagatctctgactggttaacgaagagacttaatagataagccagtccttacaatatagtggacaggtgctgaagtacagctatgaatagatgctgtgggagcacagaggagggtggccctgagccagacctttcctccctcagtggaaatatctttgtgtattattaaaatgattatttagaataaaaatgcgtaactttcatagttaaaacacacacataggcagaaaaggtgaccaaactgtatgttaatagcatcttttcccaaaatgtgtacaggcacagacaaaagtttggaagaatgtataccaaaatgttaggtgtgtacccgtggatggaaggatcatagatgataacatcatttttgtttttgtttttgtttttgtcttgtctaaaatgttttacagtgagaaatgagatcttattaaatatcactatgtaacctgttattttcttttttttttttttgaggctagagtctcgctctgtcacccaggctggagtgcagtggctcaatcttggctcactgcaacctctgcctcccgagttcaagcgattctcctgcctcagcctcccgagtagctgggattacaggagcgcgccaccacacctgactaatttttagtatttttagtagggacggagtttcactgtgttggccagactggtcttgaactcccgacttcagttgatcctcccgccttggcctcccaaagtgctgggattacaggtgtgagccatcatgcctggcctctttttacaatacacggtgattgttgtttgtcattacatgtaactctatctcattcttaaataccagtgtggcagttagtgcctgggtgtgccctcatttaattgccccctcaattggacatcggggctgtttctaaatttttctactgggaacagcactacagttacagttttgtaccatcatctggttagtgccttaggataaatttctagcagtctcagaatgcatggttaaaagagtatacatttttaatacttttccaaattgcctctaagcattatatgaactttttttttttcacttttattttaggttcaggggtacatgtacaggtttgttatataggtaaattgcatgtctcgggggtttgtgtacagattatttcgccacccaggtaatcagcatagtacctgataggtaggtagtttttcgaaccttaccctcctcaacctcccctgcctcactctcaagtagaccccagtgtctgttgttcccttagtcgtgtctgtatgtactcagtgtttagctcccacttacaagtgagaatatgtggtatttggttttctgttcctgtattagtttgcttagggtaatggcttctagctgcatccatgttgctgcaaaggacatgatctcattctttcttatggctacatagtattccatggtgtatatgtacatatatatatatatatttttatttttatttttgagacagagtcttgctctgtctcccaggctggcatgcattggcatgaactcagctcactgcaacctctacctccccagctcaaccgatcctcccatctcagccaccctagtagctgggactacagatgtgttccaccacgcccggccaagttttttgttttttgttttttgtgttttctttttgtattttttgtaaagatggggtttcaccatgttgcccaggctggtcttgaactcctgggctcaagcaatccacccaccttggcctcccagtactgggattataggcataagccaccacgcctggcccacatttttttaatccagtctactgttgatggacatttagattgatcctatgtctttgctgttgtgaatagtgctacaatgaacatacacatgcttgcatcttgtatgaatttttcctcaacaacatgagattgactgttcctactcactggccaacataggctatggtgaatcattttaaatctttccaaatctaatgaggaaataatatgttagtttttatttcattgcttattagatatagaacaactttttgcatttttactgtttttttaactctacttgtaagctaatgtgtttgtatttctttataaattggccattttcaaattgtttctattttttactgattataagagccctttatattaattatcttttcctttatgttgcattattttattattatttttttgagacagggtcttgctgcatcacccaggctggagtgaagtagcagaaccacaactcaccacagccttgacctcctaggttcaaatgattctcctgcctcagtctcctgagtagctaggactgtaggcatccaccaccatgccggactagtgttttttattttttatagagacaaagtctcgctgtgttgcccaggttggtcttgaactcttaggctgaaacgatcctgctgtctcagcctcccaaaatgctgggattacaggagtgattcaccatgcccagactgcactatttttatatttttgactttgttttcagtgtcttcctgtacagactcatgaaaatgtttttgttgccacacttactgttttacgactttcggattttacacaataccctcctcattctcagatcataatgttattctttcatgttttcttctgggagttttgcgatatattttttatttaaatttatgtggaatttgggggcataacattggagagattgaatttttttttctaagtagataatatggttaagcattctgctataggtatttcttttttttgaaacagtcttgctctgtcacccaggctggagggcagtggcgtgatcttggctcactgcaacctccgtctcctgggtttaagcgattctcatgtctcagcctcccaagtagctggaattacaggtgcccaccaccacaaccggctaattttttttgtatttttagtagagacagggttttgccatgttggtcagtctggtctcgaactcctgaccttaagcgattcacccgcctcggtctcccaaagtgctaagattacaggcgtgagccaccacacctggctgatgcttcttttatctaaaattttgaccagtattatttttctcctccttctatatataaacagagaaaactaaaataattcctgtgtttttacttgtcttcagctgatcgccatacattgctctctgcctaagaactggaggctttgcaggacttggggaggccaaggagggcagatcacctgaggtcaggagttcaagaccagcctggccaaaatggtgaaaccccacctctactaaaaatacaaaaattagctggatgtggtggcatgcacctgtaatcccagctactcaggaggctgaggctggagaatcacttgaatccaggaggcggaggtttcagtgagcagagatcacgccactgcactcctgccttggcgacagagcaagactctgtctcaaaaaaaaaaaaacaaaaaaactggaggctttgagtcaggacgtaatttacttctgtagggaacatctcctgaatcttgattaggtcgtatgcagatttttttcttagaaattactgaatgtgtaagcacagtcacaaccttagactatcttatttgtgtttgtgttctgtgtttttattaccttatctctttttctgtcaaaattgttttctgcaaagagcaaaatcatgtacttttataactccttcctccagttacaagcaatacagaatacaaaatcagattttatgatagggccaggcgtggtgctcacgcctgtaatcccagcactttgggaggccgaggcaggcggatcacctgaggtcagaagttcaagacaagcctggccaacatggtgaaaccccgtctctacaaaagtacaaaattagcctggcgtgatggcgggtgctggtaatccgagctacttgggaggctgaggcaggagaattgcttgaaccttggaggtggaggcctcagtgaggagagatcacaccattgcactccagcttggatgacagagggagactccatctcaaaaaaaaaaaaaagattttatgataggatgtctcccacccctattaagtattccccagacttaatgttgcttaaatttgggggagttttttttaaggacttcatttcagggcaggtattttaagtatgaaatctgtagtgtggcaacaatggtcttcaaagcatttgtctttaacaaggaaattatgatcatcattaatggcagtagcagccaagttgtttccaggcccattaaccaccataagaaccaacagagccacaagaacttggttgtttatggacaactgatgaagtcaaacatggaacaatttcaactgattgtcaggcttgcttaacacacagacttatacatgccccagacgggtgtatttttaacccagtaccaaaataaaactctttaacaagcgtttattgagtacgtcctgggtgaaaggaaatggagcacgcactgtgaagtttttttacgccttgcgtttgtttttttaggaggagtatgtgtctgtgatggtttattcacactctctcgctctgtcttttttacgcatttatttccgaatgactcactgggattagagatacagtttgattctgtatttttcgataaacacacagaagctaacttaatggcagggtatttaacatgagacactggtcattttataaggaagctaatgaactgagttagccaccaccgtcctttagtcaagtttcgatggttttgaacatttgttacattttggatttcaattcaaggtggcaataattcacctattttgccctgcttttttctgcccaactctaattatgtcctttgctatctgaggcatggtttctgaatgagaaatatatctctgcatttccggaataaagttaggaaagaggaagatgcggtataactgttcttttttgtgctctgtagatatgcaaagcctagagaagctattgaaagatgccattgtttatggtcagcctcggacacgaaggccctggaagaaaattctcatccttgtggaaggaatatataggtaatcctgctttattattcttacctttgtgacttggccccatgaagtcatagaattttttaactgaagggaacattagtctatccccctctggaaactaaggagacagtgtttataagtcgctaaaatacctggaaacagagtcagcattagaacagaagtctttttgtctagttcttcgttattctttccataatactacatggtcaccaaatcccctttctatttgagtcttttatttttctagtttgtagagggaacctatatgtaggggcaagaattggaatatatattttaatatgtcaaaacaaattacacaccatttaattttaataaatattttattttaggctgagtgcagtggctcacgcctgtaatcccaacactttgggaggcaaaagtgggaggtcgctcgaggccaggaatttgagaccagcttgggcaacatagtgagaccctgtctctgtaaaaaataaataaaaattaaaaagaaatattttattttggttaacctttacagcttttacacgtatttttaccacctaattttttttgttcttttgtgtcattttaattgcctgtgcaacgtgatgcaaagtctcatgttgcctgtaattacaagctttagaagaatctgctgtgaccttaattatttttgtcgtgaattaagattgcttgtgtttggtgcttgttttttgttttttggtggtttgggtggctttttttttaagatggaatctcgctgtgtcacccaggctggagtgcagtggcgggatgtcggctcactgcaacctccgcttcccggttctcctgccttagcctcccgagtagctgggattacaggtgtgtgccaccaagcccagctaatttttgtatttttagtagagacggggtttcactgtgttggccgggctggtctcgaactcctgacctcaagtgatccgcctacctcagcccaccaaagtgctgggattacaggtgtgagccaccgcgcccagccagtgcttgttttaaaagtccagttttctttcccctagtcttttgccttgccatggcttcatctacctttgtcagtttaagccacagatacagttgtcagaccatttaaaacccaataaactcagccgggcagggtggcttattcctgtaaccccagaactgtgggaggccaaggcgggtgtatcacttgaggccaggagttcgagactagcctgggaaacatgaggaaaccctatctctactaaaaatacaaacattatctgggcgtggtggtggcgggcacctctagtcccagctacttgggaggctgaggcacaagaatcgcttgaacccaggagtcagggattgtagtaagccgagattatgccactgcacttcagcctggacaatggagcaaaactctgtcccaagaaaaaaaaaagaagcagtaaactcaataataatgaagtgccaaactcccaattttgatttaaaaagtctcagtgtatatgtgtatatatatattttttcatgttttgccagcatggagggatctattgttcgtcttcctgaagtgattgccctcaagaagaaatacaaggcatacttgtatctggatgaggctcacagcattggcgccctgggccccacaggccggggtgtggtggagtactttggcctggatcccgaggatgtggatgttatgatgggaacgttcacaaagagttttggtgcttctggaggatatattggaggcaagaaggtaaacgagccatgagaatgagcgattagagataaagtcactggcaattagatttggtacctcaggcctagcagatggggccctgaactgggatgtccgcaaatttgcctctggtttaggctcataataccagtgagtgactctaatgtctcctcactgaactaaaggctggttctgttcattgtttgttgttttcttatttgagcttctttctaagctacatgctgatctgagatatagaataccctcttgtgtgaaagaacacacagtggtgctccctgcccgccccagccttctgttgggtttgcattgtgctcacagtttcaaaaacagtggggttgtcatgggagcccatgggaatagcaggtcaccttgcccttggacacaaatatatcatgagtgaacatggagacaggaagcaaaaaagttgtgccagctgtggggtactacaaagcattgtatttttcaatttttaaactatgaagttgccttttctgggtctttgtagtcagaaaaaaatcatacggtgaattttgatgcaggtaagaatctgtggtgtggtcgaaatggtgaaccataaagacagaggcctgggtctgaatatttctcggcttactttgttagacctcagggaaaacatttaacctcccagtttccttgtcagtaaaatggagataaatatgcccagcttgtaagattgtagtaagggtttaaaaagtaatatatgtccatgctacaacgtgggtgcaccttaaaaacattatggtaagtgaaaaaagtcacaaaaagtcacatattgcatgttttaaaatatgtgatacctagaataagcatagaaacagaaagtagattagtagttgccggaggcggaggggatagggaaatggaaagtgaatgctaatgggtatgaggtttcctttcagggttatggaaatgttctaaaattagtggtaaaagtggcacaactctggatatactaaaaaccactgaattgtgctttaaaacggtgaattctgtgtatgtggcttatatcacaatgaagctgttatttttaaacgttgattgcaatgttagggaaaaaataatgtatgtcaggtatttgtatatggcacagaggaggtgctcataaatgttcttaattttgcttcaccactcaatattcggagtattaaagaatggttatgctgggcacagtagctcacacctgtaatcccagcactttgagaggctgaagtgggaggattacttgagcccaggagttcaataccagctgggcaacatagtgagacttcatctctacaaaaaagtaaaaaaattagctgggtgtggtggtggcacatgcctgtagtcccaactatgggggaggctgagatgagaggattgcttgagcctgggagatcaaggatgcagtgagccgtgattacaccactgcattgcagcctgggcaacagagcaagaccctatcacagaaaaaaaggtcattcttttaatacttgattgcctgttagagagaactcattttcagtgacttttaatcagctttgatagatttttttttttttttttttttgagaccaagccttactccattgccaggctggagttcagtggcacaatcttggctcactgcaacctccgcctcctgggatcaagcgattctcctgcctcagcctcccaagtagctgggactacaggcacgtgccaccatgcccagctaattttttgtatttttagtagagacagggtttcaccgtgttggccaggatggtctcgatctcttgacctcgtgatctgcccgcctcggcctcccaaagtactaggattacaggtgtgagccactgcacctggccaggtttgatagatttttatctcaaatattacctttttgttaatgggaccaggctcactttggagagttgttttttagtaagctttgtggctgtgaaccaaaggatagaaaaataatactctgggagatcattaaagtacaatatatttgtgcttttggtttttttagtacaatttttaatatttttgagataaaactgtttcatagccacatttgtgtccccctaatttgttctggtacataagcttcttgtgtgtgcattttaaagatttggtgaaattaaaagatatcagagaatagggatatacaattaagtttttttgaaatccttgtaaatgacagagttttactttattcagtgagatgtcattggcattttaataaaataccttgtaagtttctatttcacatttatatcattttatacatttctgcatatctggaggaagttctaatgctcttaaagttgatgttagagaactgttatttaggggtagaaggatgggctttataggcacacagagctgcagatgacattttctgtgatacttggaattaaatcattatatctaaaaagcaatccaaacaccttgtttaattcagctgtgttcatttatttttaactttttttttttttttttttttaagacggagtctcactctgtcccccaggctggagtgcaatggcgcaatctcagctcactgcaacctccgtctcctaggttcaagcgattctcctgcctcagcctcccaagtagctgggattataggtgcccgcctccacgcacagctgatttttgtatttttagtagagatggggtttcaccatgttggtcaggccagtcttgaactcctgacctcagtagatccacccaccttggcctcccaaactgctgggattacaggcatgagccaccatgcacggccatatttctaactttaaatgatacattctccaaatttagaggggttgttttaaaactagtttttctcttatgttgttccatgtttaaaaaacaaaaccaaacctaagaactttgccatgtttctgacccagttgttgccagcggtatgcttcgaccatgttggttgaccttgtatctcagattagtgtccctattccagtgccattgaagtgaggagtcctctagaacttagaaggaaaggactgacattgccggtgaatgcaagaattgtctctacttatctgcctctgtgaactccccaggagctgatagactacctgcgaacacattctcatagtgcagtgtatgccacgtcattgtcacctcctgtagtggagcagatcatcacctccatgaagtgcatcatggggcaggatggcaccagccttggtaagtctttcttttcttgaaacattgcataagtccacctagcagccaaacgtgctgtttttcttgagcttttttcctaaaataaatagtcaggtttactaataggcagagctggctggtgtgtggtttccatggacacttttttagtgtgtttgatacatatgccatgagaacgaccctggctcactttctatggaattttcttgtttatagatgggaggctttactcttactatcctacataccctcttaactcagaggtaatataccttcgaggtttttcttgaattacataattttatgtgaaggtataattcactgttagtgatgtttcattaacagcatagttaagagctgctgttttcataaattagtattcctgatttaatgcctttttaaagagtttctactttcatatacggtagataataaatgacatcctgaatcagtttattttgtctttgatgggatttgtagtcccaactagatgccttgatttaaacatactactgtgaacagtgaagttcagtgttcactttctgacatttgacttttattctgcaacaccagagggcagtattgactgcagaacagtggtactaaaaggggagcaactgggtgtctgtctttactttaaaaaatattttcattgcatgtatgagacaataatttcacttgtcgctttttttttttttttttttttttgagacggagtctcactctgtcacccaggctggagtgcagtggtgtgatcttggctcactgcaagctctgcctcccgggttcacaccattctgcctcagcctcccgagtagctgggactacaggcgcccgccaccacgcccggctaatttttttgtatttttaatagagacgggatttcaccgcattagccaggatggtctcgatctcctgacctcgtgatccgccctcctcgggctcccaaagtgctgggattacaggcgtgagccaccgtgcccggcccagttgttgcttttttaatgcttgtaaagtcagtttggcatttgtaaaagatttcacattatcagccatgagctctccactctacagttatgtaatactttattgtaagattgatttggcttgcatcgaataaagtggcacatctgattttggttggtttaagactgttttctttctttctttttttttttttctggtttttgtttttgagacagagtcttgctctgtctcccgggctggagtgtagtggtgcgatctcagctcacagcaacctccgcttcccaggttcacatgattctcctgtttcagcctcccaagtagctgggaccacaggagtctgccaccacacctggccattttttttgtattttttgtagagatggggtttcaccatgttgcccaggttggtcttgaacccctgggctcaagcagtctgcctgccttggccttccaacgtgctggaattacagctgtgagccaccacacccagctgactgttttcttttcttttcttttcctttccttttctttcttttgagatggagttttgctcttgttgctcaggctggagtgcaatggcatgatcttggctcaccacaatctctgcctcccaggttcaagcgattctcctgcctcagccttcccgagtagctgggattacaggcatgcgccaccacacccggctaattttgtatgtttagtagagaccgggtttctccgtgttggtcaggctggtctcgaactcccgacctcaggtgacctgcctgccttgacttcccaaaatgctgggattacaggcgtaagccaccgcgcccagtcgactgttttcttaaatcagaattttaccttaacattttttctgatctgtgctagatccttgttatctctaatgagagatttttggaaatagtgaaatgtgatcattttcagttttgtgaattaattccttgaagaagttgttttattaatgttgcaaacacatagtggagcctgtgaatagctccctgttaataacagctatatctcctctccttctgatgtggtgttagtggaaactgtgtgtgaatctgagagacagacatatatacacacatatatatacatacagctagcatttctctaggtacttcacataggcacacttaccttactgattcagcacacaggtttaggtgactaagaaatggctaagagctatcaaagttaacattggataatttatttgccctgttccagaacatggatctgtgtgacacattacccccagataaatgacttatctgtactaaatgatgaaatctgggctgtgctagtagtgagaaaatgaaacatggtaattatatataggctttggatcagcacaagttttctagtttttgcctctagccacccccaaagcttagtgatgtgacacaacagccatctgattatgctcacagatgccacaggtcaagaattcggtcagggcacagcagggatgacttgtctttgctctgttgtctggggctggcctggaagactcaagtgtctggaaagactgagatggttggtggttgggatcatctggaagcttttccactcacatgtcacctgggctggagtgacttggagccaggctcagctgaggctgttgaccagagcaccttcatgcatgtatcttttcaatgtggcttaggctcctcatgacatcgtgactgtgtacccagaaaggatgcttcagagagcaagcattccaaagaacctggcggaaaccccatgaccttttctgacctgttgttaacaagcaggtcactaaggccatcccggattgaaggggtggggaactagattccacctccccagtggaggcatgtcaaagaatttgtggctggtttttttttttttgagatgcagtctcaaggagaagtaccatgcttttttaaacaaccagatcttgggagaactcagagcgagaactcactcattacccaaggatggcagcaagccattcacgaggatcctccccatgatccacacacctcccaccaggccctacctccgtcattggggatcacattccatcctgagatggacaaacatccaaaccatgtcagtgaatatattacatttatcattaaaactttgttattgttggattccagagtacattaagtacctggtattgaaagtaaggcttaaacatgtatatgtggttgcttattgttaaatgttttcatctttttgtgtgaagaaatgttgctctttggtgagagtacagagccttcagaaaagctgcagcatgtaagggaaggtgagatccagtttccacacgactttgtgagcgctcctttccccttcctcccaactttttccgcatttcccctccagtttctatccttttcccaaggaagaacaggacatatgactaggttgacagatcttgaaaggcaacttcactaggatctcaggtgagataataatgaatgggaattgtgctgccaggatgcctgtacctggagtgggaatactgagcacaggccagggagtagaaaaaatgaggcctaggaaattctgttaaattccactagacatttgaaattctaacttttactttacacatcactaatccgtgtccactaatggaaatttagctgtagtatctacatacgaatcaaggcaaagtgtttgaccaaatcaactaaaattttgcttttccattttccagagctgtgctttgatgtattttatttctgtccaaaggtgtagttaataataacatgcatagcacccagcttagtgtgtgacatctaggatcctttcagtaaatttattgaatgactgaatgaatgcacgcatgattggcaataccagaaaatcagtgggttcttcaagtactttattgtaacattgcttgaatagttgaatgttaagccagaatgaccaaattatggaaccaaattaactagataggtacattttaatagatacatttttaaataatgtcagaacgctttatagagttttgtacttctttgttttgaaaggaactgggtccttgcaggcagctactgatgtaggagaaaaaagactaccctgagcagattgaggtttaattaaaactaggtttggctcatttgaattaattccagtaatagacttgttaattaggtgttaaatgatcaccttgagaataccggggaactgtcaaaaactaagagaactgagacacttaaaaaaaaaaaaaaaaaaaaaaaaaaagacattccaggacaatgcagtggcacatgcctggagtcccagctactcaggaggctgaggcacgaggatcgcttgagcccaagagtcctgggctgtagcacactgtgccagagacgtgtctgcaccaagttcagccatcagtatgatgacctcccagaagtaggggaccaccaggttgcctaaggaggggtgaattggcccaggttggaaacgaacaggttaaaacttcccctgctgatcagtagtgggattacgcctgtgaatagccactgcactccagcctgggcaacatagcgagaccttgtctctttaaaacaaaacaaaacaaaaaaacattccaagattcccatgcagaagggttagaagtgttgaaaaaacacagccttgctgggagggggtcataaagagagactttcctgcctgtcttcagggctgacagcttttaaccctcccgtcaagcaccatacttcctgagcccaagaacgtttgggtgttgactttcttctttgttgtgctttaaagtaatttatttcactattagaaattcatcgaaataaaaattaagttttctggtaagcacagttttgttcttacccacagtagagtttagcagtttatctgatgctgggaatcagactcgcttcctcctgttttgtgactttctgcctagaatgctgttgtttggaaaaaaaaaaaaaaatacttgtttccgccgggtgcgatggctcacacctgtaatcccagcactttgggaggccgaggcaggcggatcacctgaggtcgggaattcaagaccagtctgaccaacatggagaaaccctgtctctaataaaaatatgaaaattagctgggtgtggtggcgcatgcctgtaatcccagcactttgggaggccaaggcaggcggatcacctgaggtcgggaattcaagactagcctgaccaacatggagaagccctgtctctaataaaaatacgaaaattagctgggcgtggtggcgcatgcctgtaatctcagctacttgggaggctgaggcaggagaattgcttgaacacaggaggttgcggtgagctgagatcgcgccattacactccaacctgggcaacaagagcgaaactccatctccaaaaaaaaaaagtgttttaccatttgttaaacacttatcaagcaacaagcaactactctctacatagtggtagatatgctgtgtgggagatgcagagttgaacaataggtgatctttgcctttgaaaaaacagtccagtggtaggggtaagattcccgggaagaactagtctcagaggcacagataaattcttcctttgttcagcttgtcttttctcaatttcctcctccattctcttctacaacctcctccttcactcactcccactcccctaaaaccttaaacttccttaaaccagctaagtttttgaagcaaactcatattttagatttcttatataataactttctatataaatgaaatttttctgtggatactgtcactctagtaaattatcagcaatcaaagcagcttcttgattattttttaaagcagcttcttgattattgagcacaaaaggccttttaaccaatggcttaagccttctgaaatcagcaagcaatatgaccaccttacaggtggagaaatttgagctcatgtatggaacaagttttctcaatatcttgtctccaactagaatgtagcttttctaactccatctgcttctacttctgaggttgcatgatgatagttagcattttattaaaacagactattttataatctgtttctaattttctgctaattttccaaagtttaattgtgagtaatcagcccaacaaatgaaagctcttttgggcatttgcctccctgttttctctccatggatcagtagccctttccccacctttctgcttcagaaatggattctgaatactcaagagcttttgcaacatggtgtgtctattttttattccactgctatctttttcttccaaatccaaatgctattaaaagtttcttgcaacaagaacattctctccttttgtgcctcgtttcagagttagtttgaagctagcaattaggatgcccagtgtctattgtttgttgaagaataattctaactttctaaaccttcacataattggaattgcttttctccccccagaattatgtctgagggctttatttttcatcaaatagacttgatcctagctgttccccaactttatagcagatacttaatatgtataaaccagtgacctgatagatggaatctgctcaaagtaagaacctgatacccggccgggcacgatggctcacgcctgtaatcccagcactttgggaagctgaggcgggtggatcacctgaggtcaggagtttgagaccagcctgaccaacatggcgaaaccctgtctctactgaaatacaaaaaaatttagccaggcatggtggcgcatgcctgcaatcccagctacttgggaggctgatggaggagaatggcttgaacctgggaggtggagattgcagggagccgagatcacgccattgcactgcagcctgggagacaagagtgaaactcccatctcaaaaaaaaaaaaagtgcccgataccctactaagagcttgccggatttgaaagctttccaaaaaggaattgatttttttttaattgtcacctatagtttttctaattatctaaatattttatttgtatctacctccctgctatctactttggcagtagagtgaggtgttaaagaaaaaattattcctgtcacttgtgaaacatgataagacagacttccttcaagggggccatggtaataagcatagggatgactgcaatggggtcttccagtgggggagagagggtgggctgcagtctgactccaataaggacagatgaggatttacagccaaggaacagggtgggagtgagtagatagaaaaatactaagaggaaacatcaggggtaagggggatgcttgccttcagcattcttgttgaaggtaggccagggtgataagataccaggggtagtcatgtaggggattttctctaatctgacttagcaggattattgctcaaactggattctgcaagaatggagaaggaggcgcaacgtcaggactttatcagaaaggactccaagaggagcctgactcaagtttggtcaaaggagagagtctttgtcaggttcagaatgacctcattaacatgaactctttaagcccctgttctcagactttgtccatggaccacctgcatcagaggtacttttagtacagtggttcataccttgcttacacacaggaaagcttaaaaaaatagtgccagtgttagagaccttctgtagacccattgagtatctcaaggcgaggcctccctgccatggcatggtgttatttaaaagcaccccagatgcttctcatgtaaggccccatttcagaaccactgctgcttgttaaaaatgaagattctagtttgttccacccaccctactgagtcttggtggatgaggccctagaatatgcattgaaaagaaaaccttaggctggatatggtaatcctgacattttgggatgtaatcgtaacattttgggaggctgaagctggaggatcacttgaggtcaggagtttgagaccagtctgggtgacatagtgtgagcctctgtctctacaaaaaattctaaaaattagccaagtgtggtggtacacgtctgtaatcctagctacttgggaggccaaggcggaggattgcacaaacccagctatgatcacaccactgcattccagcttggatgagagagggaaaccctatctctagaaaataaaaaagaggattgtctttttgacaatcctctttttttccttttaacttttttacctcagtaccaaagcagctctactgattgatggtaattgaaaaaggaaaagaaactggaagtcaagatacaaatgagggagatgtttggcttgtaagacaggcatttgctggcagagctaagttgccatttttggttgtttctggaactctaaatgcctgggatgctgacactcccttctgaacagctgatgattctggctgattgaatcagtggcataggtggagaagttagaaaccagttaggtgcagcaggaaaacagaactaagcattcagagatctgtggtcatggttcctaaggctagttggaattaattatttttgttttactttttttggggggggctgcttgtatttttataacctattaatcctcaaattacttagtacataacctacaaatggccttgcccactataaagttgttaaaatgtttagtattaaccgttttgtaaaactctgattgtcttattgtattgccttctacctctaaaactgttaacttaaatccaagccaagcctttaccagagattacctttatttgctagctgtcttcatctgtgggtagatacattactacagtgtttacgttccttatctctttgtctcagagtagcctgtgatatgttccagccccaacagaggacagtagaatggtccattaagactttctgaggccaaggtgggcggatcactcgagatcaagagttggagaccagcctggccaacatagtagtgaaaccgtgtctctactaaaaatacaaaaattagccgggtgtggtggtgcacgcctgtagtcccagctactcaggcggctgaggcaggaaaatcactggaacccgggaggtggaggttgcagtgagctgagatcgtgccactgcactccagctcaggcaacagagtgagacttggtctcaaaaacaaacaaacaaaagactttctgtcctgcctgtgggttggcacccgttaaaactcagttccttgatttttcacaggcacttggcctcttttctgccttttgtggagggccctctgtttctggctgtgcattagcaaccattcttttaaacttctgattatattgaatcagcaactttaagcttgcccctgctgcttgtcatacatcctgtggcagtcctcaggaaatcctagtttttggcattgaaatgaattaaaggattaagccacaagagggtgggggtgataaactgtgcttttaagaggaatttactgtgcagtacttggtgttagcaaaagcagttctagttcttacagggagataggaaaccaaggggctgctttagaacagcatccctaggatatgaagacgcagatctgtctgctttgatgttctttagcttgacagtggccccggctgagcactttgatatttgtcgccagtctagcaaaataggggttgtgtcttggagatggtaaacctagttcccgttgctttgcttcagtgttagaaaattactgaactcttgcttcctggaagtcccttataaatctcccttttacaagactgttctctggggcacgaaaatgcctttgcttataaagagcctgttgaaggtccatttattttccttttcttaacagaaagattttccagtgccatttagttaggacttacgggaaacatgttgttaaaatcaatctgtcctgttagctaatatttcttttattttcattttgagcttttagataagattctttatctttctgtgagataatgtgaaaaaaaacacaaaagaaataaattcaaataccagtatactctggtttttaaaaatatcttcactgactttttttttctttacatgctctactctccctctcaccctacttccttcttcacttttcacttggtactttcagatattctttgtgggtttttcttggtttttttttttttttccggacacagagtctgtctcactctgttgcccaggctggagtgcagtggcacaatcttggctcactgcaacctccgcttcccaggttcaaaccattctcatgcctcagcctcctgagtagctgggactacaggcgcgtgccactatgcctggctactctttgtatttttagtagagacggggtttctccatgttggccaggctggtgtggaactcctgacctcaggtgatccacccgccttggcctcccaaagcactgggattacagtcttgagccactgcacctggcctagatattcttagatatattcatgatgcatcccatctagatgcttgtgatgagtatataatttactgatctggaaagtgtgacaagagtttaaagtgttatctgctgccttctccccccactttagagctgttcaaagaaagtgaccattgatcattttaaaagatgagcaaaggaaagactgcttcttttttaaaaaagaaaatttgatgacctactgttagaacacatttccacatggaccccccgcttctaaatgggtgtatatccagatcatccagtctgtgtgcacagagtccttgcatttctaagttcaaaatagtaatttaaatgaaagtaggccatcataaggcattgctaggaagaggttactcttgatagatgaatgtgctgcttttggtaagaattagtttgttatttatatttaaattttgtaggccgggcctggtggcttaaacctgtaatcctaccattttgggaggccaagacgggtggatcacttgagcccaggagttcaagaccagcttgggcaacatggtgaaaccctgtctctacaaaaaaataaaataaaatacaaaaattacccaggcatggtggcttatgcctatagtcccagctacttgaggtgctgagacaggaggatcacttgagcctggcaggcggagattgcagtgagctgagatcacaccactccagcctgggtgacagagtgagtccctgactcaaaataaataaataaataaataaataaataaataaaatgttttgcaagcataccttctgagtacagttacactttgccttattcttagattttacatgttacacatatttttggttctgtgaacagattatatatggcatatttgtagttctaaactacttctgcaactaaacatgcattatatcactcatttcccctcagtggaactggtatatatggacttatgccataattaaatgttagcaatgagagagatctacctttaaaataataaaatgtgctgggtgcggtggctcacgcctgtaatcccagcactttgggagtctaaggtgggtgatcgcttgaggtcaggagttcgagaccagcctggacaacatagcgaaaccccatctctactaaaaatacaaaaattagccaggtgtggtggcggccgtctgtagtcccagctactcgggaggctgaggcaagagaatcacttgaacccaggaagcagaggttgcagtaagccaagatcacaccactgcactccagcctgggcaactgagcaagactccgtctcaaaaaatttaaaaaattaaaaaataaaagtaaaaataaataaaatgcatttcaaaatcaaatggagaccatttcttgatgatctgggctgctgtgccttcctcttcctgcatatgcacagctaattgagaatgtggtgttaaatttattagcagataagaactctgtccattacattttttttgtatgtttcaggccttttaaggcatattattcctttattgctgtctgatcttcaaaacatatccagaggaccttcttattacttttttttttttttttttttttgagacaagagtttcgctcttgttgcccatgctggcaggctggagtacaatggcacaacctctgcttaccgcaacctccgcctcccaggttcgagcgattctcctgcctcagcttcccgagtagctgggattataggcatgtgtcaccacacctggctcattttgtatttttagtagagacagggtttcttcatgttggtcaggctggtctagaactcccgaccccaggtgatctgcctgcctcggcctcccaaagtgctgggattataggcatgagccaccttgcctggcttaattgtgtttttttattagttcaagccacaataagaagtttattcagtcagcaatctgtttttgactacttaaccacgtgccagctacaaaaaaataacatatagcttcaaaagcctcttaagcggctgggcacagtggctcacgcctgtaatgccagcactttggaaggccaagactggcagatcacttgaggttaggagtttgagaccagcctggccaacatgacaaaaccccatctctattaaaaatataaaaattagccagacttggtggcaggcacctgtaatcccagctacttgagaggctgtggcaggaggatcacttgagcccaggagccagaggttgcaatgaaccgagatcacaccactgtactccaggctgggcgacacaacgagaccccatctccaaaaaaaaaaaaaaaaaaaaaaagcctcttaagataaaattttcatttttttgaattctcagaataaacaacagtttcttagtgttagattacaattatttcttaataccacttagatccttctttttttaattaattttttctctttttggtgtctgagtgggccttagagttagaaaataactgtctcctgttggcttgccttttctctttttcctcaaggtctttaatatctccctagaagataaaaaggatatatgcccatttgtttctgttttttcccaatttgatgatagaagaataggccttaaaatattataggtcttgttataggtaaaataacaaaaatagaaaataatataaatgatcttacatatgtaaatataaaataagtttttaaagaccgtttgtttaagcatttcattaagtgctttaatggagtatcccattttcttaaaacagccttatctagtaggtagttatcatcatcatcatcatccccattgccattcccattttgcagatgaagaaaccaaactcagaggttaagtgacttggctgtagccatacagctactagatgctcaagccaggatacaaacgtagatagtctgacttcagaagtttatataccacaggctggggatagtggctcatgcctgcaatcccagcactttgggaggctgaggcaggtggatcacctgaggtcaggagtttgagaccagcctgagcaacatggcgaaaccccatctctactaaaaatacaaaaattagccagatgtggtgacgcatgcctgtaatcccagctacttgggaggctgaggcacaagaatagtttgaacccgggaggcagaggtagcattgagccaagatcaagccactgcactccagcctgggcaacagagcaagactctgtctcaaaaaaaaagtttatatagaaccaaattaaaactactaataagtgaaattcaggaagatggtgaaattattagttctctctttctttctgagacctgcattactgctttgatgtatgacatccaaaatgactgtcttattatttcaagtttaaaatgtcctccatgcaagcatatctctgtgcctattctagattattagatgtgagaataaaattagctcaggtagagacaggatcccatccccattatgatggggtgtgcatgagtggtagttttcagaaaaggacggtgtctgcttgccatcttgaacactcagatttgcaaaggtaatttgcctcacctggatgataattactgggtgatgtgatggtagaggtactctaaattggagaataaaggaaaacctcaaaagctttggaaagttcatagcatcgtagagggtaaaatatatgaagcttgtttataaactataaatcagagcattagagaatgaagtgattatatgttagtaaaatcagctgtgtccttgtgttatgtgttaaaattaataagagtgtgcacaggaaatagaaaatggagaattggaaacaacaagggaagtaagatagtcgttcatttcatttttcaaagttaaggctaagccgaagggtcggaacatgttgtatggaagataggaacagcatgattttaagagaagaatacatgaacaagtgaaataacagtggccgtttattgtctgcttaccatgtagttagcactgttctaactgcttttcattaaattctcagaacaagtattaaatgttagacattattttccctcttttacaaaagggggaagctgagaggttaaggaaacaaagaggttaagttgcttacccaaggacacatagttactagtgttggagccagtttgaactcatggatccagttccagaatgctttttgtgtactagatatttattaatgtattagatgattgtttgccttaatgtaattgactatataggtaattttgctttgtaatttaaattagttcgaatacataacgtgttttcattttcccagcgtatttcaacttggcttatctgctcagtgttcttgggggagttactagggaaaaaaatataacagtatttgtcctcagagtttgcagtttgttctggcaacacgagaccacacataaacggcataagtacagtaacaggaacttataaacaagagcaaattaatgaattacaaagtagagacatgtcttaaaatgtgccatagggaatctttccataacttttttttttttttaacttctgccctttatctttcatagtgttctttggtttctttggggtttttaaagataagaagtacataggccaggtgcagtggctcacgtctgtaatcctagcactttgtgaggcagaggcgggtagatcacgaggtcaggagttcatcagccttgccaagatggtgaaaccccatctctactaaaattccaaaaattagctgggtgtggtggcaggtgcctgtagtcccagctattcaggaggctgaggcaggagaattgcttgaacctgggaggcggaggttgcagtaagccaagattgcaccattgcactccagtctgggcaacagagcgagacttcatctcaaaaaaagaagtgggggggtgggggaatacatagacattggtagaaaataacaaaaacaaaattaaaatttacaaattgcttgtatttactgatttgcatgattttcacctaaactgcagaaaattgtccataggagtttttactagtagtattttatctttaccactgatctaatggtagaaaaagaaatagagctctaagagaggtttttttttcttctttttaaaagttatcacttgtcttttgtttacatagaaaagtgtggctttggaataaattatattacttgacccacctcccacaaaagttttgcttaaactcggcctataggctggaaggactaggatgaaaaggggtattgctaatggatactggtttctttttgagtgatgaaaatattctaacatttattgtcataagaggtgcagaactctatactaaaaaacatttaactgtgtgctttaaatgggtgaattttatggcacgtgatatatatctcaataaagctgtttaaaaaatcacctggtgacgtgaatccattggtcaaaaataaaataaagagaaaaaaaaaaccaaaaaatacctgacctacagtgagcaaacagtgtcacctataataaatttaaaacttttttattgtggtaaatatatataacaaaattaatcatttttcggtacaattcagtggcattacatacatccagtgctgtgcaaccatcaccactatccatttatagaaccttttcatcatctcagaaaataatttttaatattctagttcaagtttggaagcagtagtcttgacctactgcatttcaaaatctaggctctagaaatacttgctccaccaaaattgagttgtgtctccacagtttttagcctttttgctggtttcccctcaaaccaactttttcttttgtgtttcctatctcaggtaatggcatcactattcatgaagttgtccaaacaagaaatacctatcatcgtttctctcctttatcccctgtatttagtcaccagtgcctatggatcatgcttccttaatatctttgaacctgtctacttctccatatctcattgttatttacttgacttagatttctgtccactttcacctggttttaatagccagccagtcataatagtagaggaatcagtcaagcaaaaatgctttggaagaattaaataagcaatgctgaacatcaggaattgtagatatccgtacagagagttccagtaaaattttatgagtccacgaccccttttctaagcagtctggtccatgttggtctcatacctcatatgcaggattcattcattcattaaatatttgtttcataccttgtttgtaacacttctgtctgccttctaaatgtatcctcagtccactttctaccacttgctactgtgttcatccaagtcaccatcttccctcctgtggtgtctctgcttccctctttgcatctattctaaatatagatagctctcagtgtgatcctgatgggagatcatatctatcttctgtttaagaaccctccccaaaggccttctcatcccgcctaaagtcagtgaagacctgtgggcccttgggatctatctgtctgttgacttcctctatcccactcttcccctcactcgctgttccatatttcttgcatatgctgggtgtgctttttgctccgggtcttggcagtttatagaaatagcacttggggctgggtgtggtggctcacagctgtaatcctagcactttggaaggccgaggcgggcagatcacctaagattgggagttcgagaccagcctgaccaacatggagaaaccctgtctctactgaaaatacaagattagccaggtgtggtggcgcatgcctgtaatcccagctactcgggaggctgaggcaggagaatcgcttgaacccgggaggcggagggttgcagtgagccaagatggcgccattgcactccgcctgggcaacaagagcgaaactccatctcaaaaaaaaaaagaaatagcacttggctgcatcaggtctttcctgaaacacttctttagtgagtattaattttgtttgttgtccatctcccacactggaatgtaagctgcataaaggcaggagttttgtctgtttcatttgctgcagaatgtccagggtctagagcaatatctggtgcatcatgagtgctcagcatatgtttttttaatgacatctgcttccctagtgcacaatatgttctcccctttttgtgtagtcttctttttgcctttggtgaaatcaatttttttttattttgcctttggtgaaatcaatttctatttcttctatgtttagcatatgtgtgtgtgtgtgtgtactgaaatatgtgaaatgtttattatttaattttatataccagatttctgtgttaaaaattttttatatcataaagttagactgccctgaggcttcagaaatgttagtagcctcctaatttgacttctttagtgtttaagtttctttcagaaatcctgaaacatatccacaaccgctgtatgtatacagtttcttttaacacttatttggtgaatttatcaatatgaatttgtcatgtttctcaaaatgagcacttttaaaaaattggtaatattgaatttgatgaaacctattatttatatggagtaaataatatgaagtggaacaaatttacatgttccctttgagactttttatagatatgcatttgtgtgtgtgtgtgtgtgtgtgtgtgtgtgtgtgtgtgtgtgagagagagagagaaagagagagagacagggtctcattctgttgtccaggctgtagtgcggcggcatgctctcagctcactgcaacctctaccacccaggctcaagcagtcctcccacctcagcctcccaagtagttgggaccacaggcgtgcgtcaccacacctggtaatttttgtattttttgtaaagacggggttttgccatgttgcccaggctggtcttgaactcctgagctcaagggatcctcccgcctcggcctcccaagagtgctgggattacaggcatgagccactgcgcccagcccatatttattctaaaagaaagaagtagaggttataacaggaattcaaaattcagttggcaccagcaaaccccagagacttaggaatattttttgttacttttgctatcgaatctaaacgttcatttgcccaacctacttcccctttcttgaaagaagtaaaaattacttttggaaatttcctgaataaatggagtcaggaatcccagcagttcttactgttaaaggacgtgcttgcacacgtaaagaagggtctgtttacctaaggtttatttagctctggaacatcgtaagccctggtacaagtccagccttcccgaaactaactgcttgcgtgtacactccctgctcagcttcgccccttttaaaatgaagtcaaaacattctaatttggtaaaggtgttaggtcctgagaaattattactttgtcaatattaccgtatttgcttttcagaatttcagattccagtcatcctagagagcatattatttctacaaaaactgttttaggaggactttgttatacattgctattatactcacccagagacagttacttttttttttttttttttttgcaacggagtttcgctcttgtcacccatgctagagtgcaatggcacagtcttggctcactgcaacctctgcctcctgggttcaagcaattcttctgactcagcctcccaagtagctggaactccaggcgtgcaccaccacgcccagctaatttttgtatttttttagtagagacagggtttcaccatgttggtcaagctggtctcaaactccgaaccgcaggtgatctgcccaccttggcctcccaaagtgctgggattacaggcgtgagccactgtgcccagctgacatttaaattttttaatctgaaactgaccttttctgttaacatgaagcatttgttcatgctttgctactatggtggtgtcattttaactttttctttgctgaataattttgtactccattgtatcctcataatttcaattgtagtgtcccatagccctccaaaaaaagcagtcagaatcagattttttattttatttatttatttatttttatttttatttttattttttgagacagagtcttgctctgttgcccaggctggagtgcagtggcactatctcggctcactgcaagctccgcctcctgggttcacaccattctcctgcctcagcctcccgagtagctgggactacaggcgcctgccaccacacccagctaattttttgtatttttagcagagatgggctttcactgtgttagccaggatggtctccatctcctgacctcgtgatccacctgcctcggcctcccaaagtgctgggtttacaggtgtgagccaccgcgcccagcccagaatcagatttttatattaagttactaattttttgtgccagccgtccatcagcctccccatcttggcagggtatgcagaagaaaaacctaatagtaaaatatctagggaaaatgtcttcatgagaattaaagcaaatgcacagataaaaaacgaatatttttattaccaggattttctattctgtgtattcattcacgtgagcatttaaagagagaaagggaaagaagggaaggccagctttcatttcttgcctcaggacatttaagtttgaagtgctgttttcctaacacttaccccatcttacaatacaaattcccggaatatgcagcaccaaaaatttcagtatttttccagatttgtcttaaaaccaaaggttaagaggagagttcctgagcccacacctgtaatatttagatggttctgttttgttgttgttgttgtttttaagtaaaaggggtattattaaataatagttggctgtatttaaaatcatcaatagagagatgagaaatttaacctcaattccatttttgtttaactttgggtgattttccaagtattttaaattttatttttattcttattgaagtattgacattcatacaatgaagtgtacagatcttagacatacagttttcataaatatactcatctaatcaccacccagattgcagtataaaacattccaggctgggtgcagtggctcacgcctgtaatcccagcactttgggaggccaaggccagcagatcacctgaggttgggagttcaagaccagcctgaccaacatggagaaaccctgtctctactaaaaatacaaaattagccgggcatggtggcacttgccttaatcccagctactcaggaggctgagggaggagaatcgtttaaacctgggaggtggaggttgcggtggaccgagattgtgccattgcactccagcctgggcaacaaaagcaaaactccatcacaaaaaagaagaagaagaagaagaggaggaggaggaggaggaggaggagggggagggggaggaggaggaggaggaggagaaggaggagaagaagaagaagaagaagaagaaagtcatggtccctgtgaagaaataactttcagggcttatggtagagaacagtcaaccaggaagagtaccatcttcctgagaagcatatggaatagtctagaggtatttttggtcacagactaggttgctgtggcactgttggcatgcacagcccagaggccagtgatgctcaatgttgtgcaaggcactaaacagcctaaacaatgaagaactgttttgcccaaaatgccaacaacaatcttactgagaaactctggaaatggttgactgaaattttgcagggtgccctctttggaagatgcaggatggcagaaatcctagattaaaatgggaaaggagaatgcaggatggaaggaaatctgtgggcaccacctctttccctgggattctgcatgatgtagtagactgaaggagaagcagtgtgatgtggcggaggcggtgttagggaagaattcacagtaggtagatgagtctcaacagggtgggccaacgtgcattgttgattatttgtaatgcaacaaagttactcacttattcctcttctaaattcctacgttaaatacttaacattcccttttagtcaatcctagcaatacaggagctagaatacatcattgagtcattcaaagtccagtctttgaaaccagaagaaccagggagtcaagtcttggtttctctattttaagatatgtaacctcactgggcatcagtttagtttcttagctgtaacataactcttaaatatgccttgcttctaaaagggagaggtgggaaagcctactaagtctgttcttcctctcagaagttacttatatggtgtattgaaagatcttgtggtttaggcctggtggatcacttgaggtcaggagtttgagacgagcctggccaacgtggtgaaaccctgtctctactaaaaatacaaaaattagctaagtctggtggcgggcacctgtaatcccagctactcaggaggctgaggcacgagaatcgcttgaacctaggaggtggaggttgtagtgagctgagatcgtgccgctgcactccagcctgggcaacagagcaagactccatctcaaaataaataaataaatattttttttttttaaaaaagatcctgtggtttaaatgttgagcatgatggaaatttgaaatgtttttaacccaggtttgcttatctttttttgaaagcattacctgatttcatctgagattttctactatgcacactatttggagttcttggaaatgatgtaataacaatagtcactcctatctcctcctccacataagtccaagataccttcagctgagatgagattaagctgttgttctaacatgtggagttagctgtagcaccataaatgcaagagaattcttaatttaaattaatataaatcaacatattctttcatttgtttatgatagactataaagtactgtcttatcaggagataaggcaggctagcagttgacttggtaatatttagagatgtagtaaccaaagcaaaatgtaatattcccctgcttagaaattgctttactgggccaggcaggtggatcacattagcccaggagtttgagaccagcctggccaacatggtgaagtcccatctctactgaaaatacaaaaatgagccaggcatggtggcgcacatctgtaatcccagctacttgggaggctgaggcacgagaatctcttgaatccaggaggtggaggttgcagtaggccaagattgcaccactgcactccagcctgggcgacagaatgactctgtctcaaaaaaaaaaaaaaaaaaaaaagaaagaaagaaattgctttcctagaaaaagtgaaaaaaagcaaacattaattgggcctagcactgtgctattttctttactcactttgcttaaagggagtcagtactgagagcttccataattactttggtaatagcctttgaaaacgtagtttgctttgacttatctgatgttataaacacttgtgtaagaggtctttaagatataagttccagttttagatttcaatagagacacacaacgcaggcaaagtaaacatcaagggtatgtaagtttatttctatcagtggagaacatactttgtcatgtcctggtttaaactgtcctagaaaaggcatatttgttaaaaaaaaaaaaaaaaaaaaaagaagaagttttcaaagagaaacttcacaggaatgaaatgtgttctttctctctctatagtataatccaaccaaagtaaaatatgagaaaaggtgtacttccaaataataaaaataaggctgggcacagtgactcacgcctgtaatcccagcattttgggaggctgaggtgggtggatcacttgaggtcagacgttcaagaccagcctggccaacatggtgaaaccctgtctctactaaaaatacaaaaaaattaaccaggcatggtggcgggcgcctgtaagctcagctactcagaaggctgaggcaggagaatctcttgaacctgggaggcagaggttgcaacgagccaagattgcaccattgcataccagcctgggcgacaagagtgagactctgtctcaaaaaacaaacaaaaaataacaaaaataagacctttgaaacagatgattaaagtaaaagattgacagttagcttcaattcttataaaaaattgttaaatgaaagagatatgaaataaccacaatttgctattatagtatatattagagctagatgatgggtagtatttttccatattttatcctgctttatgtcaattaattcctagttaatgctgaaaactaactgaaaccattcttggagctatctatttgagggaccctgagctgatatagaaaacttttacctgctttgagaatataacctttaagaagaaaagggggggctgggcgcagtgcctcatgcctgtaatcccagcactttgggaggccgaggcgggcagatcccctgaggtcaggagttcgagaccagcctgatcaacatggagaaaccccgtctctactaaaaatacgaaattagccaggcatggtggcacatgcctgtaatcccagctactcgggaggctgagtcaggagaattgcctgaacccgggaggcggaggttgctatgagccgagatcgcgccattgcactcctgcctgggcaacaagagtgaaactccatctcaaaaaaaaaagaagaggaaaagaggggtggggaagttcttcaatttcaaattctttcagtgcactgtaattaattggaaagtataagttggaggagtagcagtaattttattttattttccccaggaagacagattatatatcagcatattcaggaaatctaagaagattaggagctgtgtaatgaagtataatatgagttaggagatcaactctggctgaacatccttaatatttgtgtcctttattttgaaagatttcagttaacaacagaaatgttatttttgaagctgcaggctcaaacatgtttttgttggttatggtataagttgtataaaagctcatcagctaaactggaaatcatattactactgaagcagctgagtgcatgctctattctttgaagtataatgctaaatagtactagtttaagacaaaaatgtctgctgcctttatattccttactttattacatggatcttttcctggctttcaaaaaaacaaaaaaaaaagcagtcttgagcgttcagaaaatttatagaacactgtctgttctaagtcacacctatctaggagggcttatggagtttatttcagtaataatatagtagttccttctaaccttaagattacatgcatggctgagaatcttgagaaatttggattaagacttgataaaatattccttttaaaaatgactgaaaagcaattggtacaccttaaatctgtttggcagtgattaatgtagttccctaaatctaattctgttttgtaaacgtgattgaaggttatcaatatctagtggttatcagtaggtagataattgtggcgctccttcaacctctaccctccatccttttcaaggccttctagttccttaagagaactaaatctaggcctggtgcgatggatcagttgagggtcaggagttttagaccagcctggccaacaaagtgaagccctgtctctactaaaaatacaaaaaattagccaggcatggtggcacttgcctgtaatcccagctactcaggaagctgaggcaggagaatcgcttgagcctgagaggcagagattgcagtgagctgagatcgcaccactgcactgcagcctgggcaacagagtgacactccatctcaattaaaaaaaaaaaaaaagaggccgggcgcagtggctcacgcctgtaatcccagcactttgggaggccgaggcaggtggatcatgaggtcaggagatcgacatcatcctgcctaacatggtgaaaccccatctctactaaaaatacaaaaaattagccgggtgttgtggcgggttgctgcagtcccagctactcgggagtctgaggcaggagaatggcgtgaacccaggaggcggagcttgcagtgagccaggagcacgccactgcactccagcctgggcaacagagtgagactctgtctcaaaaaaaaaaaaagaactaaataatctaatgatgctgttacagcatattgatcttttatatctattccttccttcctgagaataagatttattgtaaagaggttgaagactaaaaatgacctgttaaagttatctacattttccaagaaattaactacatatttacttttctctgtctcttccatgccaagctgtagatttttttacagtagagttcctaaaaatagttttattctaacaaaccatattgaagtccaaaaggacagccacacagttaagtttatttgtaaaattcaagagtcagtacagatttttctcctccaaattgcttttatgctttttatcacccttaaaagtaaagatttatgtttgaaaagtaggaaagaattctgacctctttatatttccatctgtgttctttcggagccaaagataaaaacttcttaagagcagtatttttttaaacagtgctaaactttcttctttgtttcaagtctgtattagaccagatacttgctgaaactctgcagtgaaaaatccttgggactgagctactacactggcgttaaatagcaattggtcttcttgcataaatattaactgctattttatatgatactcaagtcaaagtgggtaactatgttgtctgttaagattcagtttcactttaagagcaaaggataactattttctaacgtgtaaatgccagggcttactgatttgtctacatttattttactgcttttattttcctgttattctctttgaaattagtaagttaaaccataagaaatttcctgctttaaggtcaaaaatggtagcatgttggcagtttgatggttcagcctagcaattttaaaggataacaggccactttatttttatatatttatttatttatttgagatggagtctctgtcacccaggctggagtgcaatggcataatctcggctcactgcaagctccgcctcctgggttcatgccattctctcgcctcagcctcccaggtagctgggactacaggcgcccaccaccacgcccggctaattttgtttttgcatttttagtagagacggggtttcaccgtgttagccaggatggtctcgatctcctgaccttgtgatccgcccgcttcagcctcccaaagtgctgggattacaggcgtgagccaccatgcccagccctcctttttaaatttttttaatttttctttttttttttcgagacggagtttcactcttattgcccagggcagagtgcaatggcgcagtctcgctcacggcaacctctacctcccaggttcaagcaattctcctgcctcagcctcctgagtagctgggattacaggcatgcaccaccacacctggctaattttgtatttttggtagagatgggatttctccatttggtcaggctactctcaaactcccaacctcaggtggtccgcctgtctgggcctcccaaagtgctgggattacaggcgtgagccaccgtgcctggctcatttttcgtaagtgacagagtctcacactatgttacccaggctggagtgcagtggctgtttacaggtgcagtcatagctcactacagccccaaactcctgactcaagagatcctcctgcctcagccccccaagtagccagaatcacaccactgtgcctggctttcctttttttaaaaattgatacataatatttatggggtacatatgatattttgatagatgcatacggtatcaaatattctgatcaaatcagagtattttggatatgtgtcaccgcaaacattatcatttctgtgtgtttagaacatttcagctcttctagctattttgaaatacacggtaaactattgttaactgtagtcatcctgtgctatcaaaagctataatttattcctcctatctaactatatgtttgtacccattaaccaacctctcttcaatccccctttccctaccattcccagcctctggtaaccactgttctactctctacctccatgagatcaacttttttagctcccacatgagtcagaacatgcgatacgtgtctttccgtgcctggctcatttcacttaacatcatgaccttcagtcccatccatcttgtgcaaatgacagcatttcattcttttcatggctggatagtattccgttgtgtgcatctgccacattttctttatccattcatccgctgatacttagaatgattccgtatttggctcttgtgaatagtgctgtagtaaacatagctgtgcacacatccctttgatacactgatttccttttatttggataaacagcagtagtgggattgctggattgtatggtagttccatttttagtttgaaaaaacttttttttttttttttaacagaggctagttaatttgtgattagatagctaaaaggtttgtgatttttttttaaaggtggtggctgggcagcatggtggctcactcctgtaatcccatgccacaatcaaggttagaatattttcatcgtccctcctggaagttcccttctgcccctttgctatcagccgccttcccatactttctggcaaccatgaatctgttttctgtcattacagtatgtctttttagagtttcatacaaacgaattcatacagtgtgcagtctcatgtctggcttatttcaatgaacattatattttgagattcatcagcattgttgccttagcaatcatttgttccttttcatatatttcctttctctcctcatgtttcttctacctttttgaacatatagatcatatttataatggcctttaacatccatatctgctaatactccgttatttttggtcggtttttattgactgacttttcccctggttgtacgtcatattttcctgtttctttgaatgcctggaattttaaaattatatgttggacattaattttacattgctagtttctatatcttgttgttttcctttaggtaatgttggactttgttcttggaatcagtaggatcctttcaaagcttgcttttaaggttagggtgggttcagaccaatttttagtctagggttcatttatctccactactaaggtgataggagtagagtccccttctgaggactctgttagataacccacatattataagatctttatattttggtggacaaaaatacaaactattcccagctccatgtgagtgcaggaattgtttggcctattgctttctgatggatcttttccccagcctctgctagtttcttttcatgcgtatagaaatcagtacccttcccaaagttcaaagggacccttcagcagatctctaaagctctctcatcgcaccccacctccctgctcctgtacactgcccaacaaattctagcccccgcagcctccccagctctgatctcaactgaccactctccactccaatctcagatgtcctcagctggcaagactgggccctccttccctgtgcagcagcctgcaacctgccttcaggcagcacagtctggcattccccgtggttcaatgtctaaaagtcattgtttatgtactttgtccagtttcctattgtttacagcaggaagataaatccagcctctagtactccatggccagaagaagtctcatcttctaaatgtaaattaagcatgtattgatacttctagggggaagttaggggacttggctcatcagttcccaacatacttaaatataacacactttaatgtctgctttcttctttgtaacttaagcgatgacataaatgatgctcttcagtgctcacactaggctaatctaagcttgagtgtttttctgtgatcaacttgaaattatctacataaagagtattaattttgacttatttgtggccaacttatatagagtagcttcccatgaatgatggatatgttagtattctgattctaaggacattgttagctatctgtatgtctggttaatttgtcataagaacttatgtcatgtatcatgcttggacttttaaaaatatgaacttgctgattttataatctatatatgaaaattactgcagccttttctattcatgagtattcatggttgagaagattctaaaacagttcttagccctttccaagcagatcttttaaatttattgctttgctctgtataacagaacagttgtttggatatcttttcaaagattgacttaccataatgtcaaaacctgcccaaatatttagtcagttggcaattgcagacagaaacgtgtgttttaatctatttgtgttttagggaagatgagcaaaataggattaaagatacgattttatactattacagatatgttactgttgtctggtaagaattttaaggaaacaggctaggcgcggtggctcatgtctgtaatcccagcactttgggaggccaaggtgggtagatcacttgaggttaggtgttcgagaccagcctggccaacatggcgaaaccctgtctctactaaaaatacaaaagttagctgggcgtggtgatgtgcacccgtaaccccagctatcaggaagctgagacaggagaatcgcttgaacccgggaagcagagattgcagtgagccaagatcgtgccgttgcactccagcctgggcgacagagtgagacaccgtctcaaaaaaaaaagaaagaaaaagaaaaaaagaattgtaaggaaacaacaaaatgaaactcagaagatgaaaatttgggggtctaaaggcttcatctctggtcttatgtgtaaaatttatttgcagcacagttaattagaatgaatcttaaagttagaagatgtaaattctagttgcagctatgccacttgctacttgtaatgtgccacacactattgtgcaactgtaggcatgtcactaccttggtgagagtctccccacctataatatgaagataatcataaatatcctgcctactgtcaagggatttgtggagtgctcagtgagggggtatggctgaaattctttgaggatgctaacgctccattaaacgttttttacattattataacttctgctgttaacaggtagaatgacagaatacaaaatgagacattttacatttatattccatatggtttactctgtaaaatattttatggtgaaatggaaaaaaacgaaacagaactgattagatagaatggagatagaggagatttactgtcttttttccattcctttttacttaggattattttgttttctctcaccgtgactttccaggtaaagagtgtgtacaacagttagctgaaaacaccaggtatttcaggagacgcctgaaagagatgggcttcatcatctatggaaatgaagactctccagtagtgcctttgatgctctacatgcctgccaaaattgggtacgttttgttgcagatcacagaccagtctgtccttatccttatctgtgatgtgagaccagggcttatgtattttgttagggaaaatggtcttgtccttactgtgttaaccttcatttggtacatatgccatagatcaaatagtggattccaaattgtaaagtatgttaatttgttcttctttcattaaacatttgagtttcatgtactctctaggggcctgggatagatcagtgaataaaatacaaacatctctgtccttgtggagcttacagtctagtagggggcaacagtcagacagacataataaacaaatgaactgtgtacgatgttagaaggtgtcaagtgctatggaaaaaaatagagcaggacctatatggggagttgagagtgccctgtgggcgggccgataacactattaaatagggtggtcagggtaaggaagcctccttgggaaggaaaatgacatctgagcaaagatttgaaggagctgacagccactggagaaagaagcatctgtgcaaaggccacagtacagaagcgagcttgcttagctgacggaagagtagcaaagaggtccctggaattggagcaccgtgccccagggcgagcagtgggccatgaggtcagagaggttttatcagagtgtgttattggatacttaccaggtgtgcagattacaccagcttctttggtttgtatgaggcatacataatggaaagccctgccctaggatagctttcaatgtatttgagaagtccagatgtataatgaaaccagaagacatttgaaaagcaaatgaacagtaattatactgaacaaattttattatatgcaaagtggccctgaagatgtagaataaaggagtgacctgcttagtataggctcagtaagaaaggcacatcttgttggatgggtgagttttgagctggatcttaaagcatttctccagtttgattgaactcattgaaggagcaatttttgtaaatttttgaatccccagtgtccaccacagtctccgacactcagtaaatgtttactgaaatgaatatgggagaggaaattaaatcagggaacctggaagtaatgtgattcaaagagaatgaaagggaagtaaggaaaaggtgctccctgagagaaaaagaagaatttgggtttcaacatgaagtcatatgggcagttggtattatggcttcagaggggatggggaaggattttcttcattcttctttaagtggaattctcataaacaaacatgaagagttatcagatccaaaggactcagtctagagctctctttaaagaaggctgtgtctcctttattctacataggtgcaactgactgtgtacactttaattaggaaagatttagagaaggtacaggacccaaaagggcacaaaaaagcaataactactaaatataaggaaaacaactctgtatacagcatgtataaagaaaagcaaggtatatttggggagataaaagttgtaaaggcattaagatgtgtgtttgttgagaaaaaataaatttgtgcatttaagaagttaaaaaaaaaagatttagagaaggtaaagaattagaataaggcactagacagtttgggagcatgtgctgaagatacagggcacccaggttcatgctgacacaaaggaggtatgttgaggaagatgtactggtactacagagagtgggaaaaggctgtgaaaagactggcattaatgtaatgccaaatgtgcaggatctgtatagcccaggctggagtgcaatggcgtgatctcggcttactgcaacctccacctcccaggttcaagcaaatcttgtgcttccgcctccccagtagctgggattacagatgtgtgccaccacacctggctaatttttgtattttttagtggagatggggtctaaccatgttggccaggctggtctccaactcctgacctcaggtgatctgcccgcctcggcctcccaaagtgctgggattacaggcacgagccactggcccggccacatttttttattctcaaacaaatgctgtaaacagcttaaaggaaaagttgaaacataagggaggtcaataagaggaaaagacaaaaagcaacataatttgggccaggcacagtggctcacacctgtaatcccactttgggaggccgaggtgggtggatcacaaggtcaggagatcgagaccatcctggccaacatggtgaaaccccgtctctactaaaaatacgaaaatcatctgggtgtggtggtgcacacctgtaatcccagctgctcgggaggctgaggcaggagaattgctagaatctgggaggtggaggttatggtgagccaagatcgtgccactgcactgcagcctggcgacaaagcgagagactcaaaaaaaaacccacataatttagtagacaaaattaactaaaagttagaatgtgttatttagacaagatacagatgtggagtaaggccacagggcctccaatttggcttacgataggggtgggggattgttaaatacgaattgtgtggtctgagtaatcagctgaagccagcgggtgaactggcctgacagacaccaaaggaagccctgaattctgaagcagtgttgttcccaagacaattaaagaaacgtgtgatctggagagctcatgccagtcagccattctgctagcagaaaagatgtgccgtgttacagcagatcccccacagctgcagaatcctcagaatttgcggattaatgttaaactgccaagcttaacatttcaaggaccagattttaattaaatacaggttcattttgaagcctctgaaccactattacatatcagggacacttttttttttttttgagacagagccttgctctgttgctcaggctggagtacagtcgtgtgatcttgccttactacagcttctgcctccaagcttcgagagattctcatgcctcagcctcctgagtagctgggactacaggtgcatgccaccacacatagctaattttttgtatttttggtagagacgggatttcaccatgttgcccaggctggttatttcagttttgtgaaggacaccatataggagaagactgctttaggattgactttaaaagtatttgtgagctgtcaattttaactttaaaaggagttaaaggaaactcctattagaagtctccaatgcctgcatcaccaaagagttgaaatctttgaggacagcaggtcctctgtaatgagtgctttttcactcctcctggtttctgttcttgttttcccctttgcagcgcctttggacgggagatgctgaagcggaacatcggtgtcgttgtggttggatttcctgccaccccaattattgagtccagagccaggttttgcctgtcagcagctcataccaaagaaatacttgatactgtaagtaggcactttcaccttgatataaatatgccttttattaaaagggcctgtatattagatgaaattcataatatattgatcttgatgttcttgtgagcacctaagacagagggggtgacagtgctaccaaaaacattggcatttacaaaaaaactgtcacccaccacacctgcatcatgagagctctggagaattttccggctttgtcttgctctactgtctccctcactatggactctacaattctctttccactctagctatttctacattaagctttctcatatgttgttctgtctaaaattttctctcttgagctttctctcccctctgcctggctgactgccactcattcttcacatctccatttaaaggaaaattgctcaggggcgccccacaccttcttgctctgtgttcccttggaatcctgagattctcccttactaaattcttcacacctataattatttaatagcagtcttctccattagataaatattgaggataggaataagtctgttttactgattctatatcccagcacccaccacactgccaggcatctagttggggatcattattactaagcttaattatttattatctcaagatattctcatctctatatattctcttaatatgttattgttgcaagtctaagatttcagagtttaaatcattattgccatctgggagtttataaagctttagaacatgacatttgcataaaattagttgctagaaatatccattaatgagttagagagctactaattttttttttcttttttgagagagagttttgcccttgttgcccaggctggagtgcaatggcgtgatctcagctcaccacatcctctgcctcctgggttcaagcaattctgcctcagccccctgagtagctgggattacaggcatgcgccaccatgcccagctagttttgtatttttagtagagtcagggtttctccatgttggtcaggctggtctcgaactcccgacctcaggtgatccgcctgcctcagcctcccaaagtgctgggattgcaggcgtgagccactgcctggcaagagctactaatcctaaagaacattatgaatgcttctttataaaagttaattataacaatttgatggacattttgtattcctgaatagccgaagacttgacttttcttctctgtttctacacagcaaaatttctatgagtataagtgtattcccttttaaaaaacaaaattgtagtaagaacacttaacatgagatctgtcctcttaacaaatttttccatgtcgaatacagtattgttaactataggcacagtgttgtgagcatattcttaattacattctgacaatatccaattagattcaactttttgatattgtatcttttttttctttattttgattatgcctgtcagatttttccaatggatttttctcatttctcagaaattttactggtgaatttctgtgatgattttttttaacctagagatttcagcttttctttccttcctactctattgatgttttaagaattttcttttttctttctcatgttcacctgttaactcagaatttcaatgtgcctttaaaaaaaagtctgtgtaactataaccagtgtctatggcagtaatccatgccttctgaccacaactttgacttctgagaactgtacacattcatgaaagaatttagatgtaaccaggatatctccttaggatatctaaggagatttctgttgccaacaagtatgtttgccaactgagagttctaatccttttcataagattctcttgagggattgttgggctttgcctcccatttagttttttaaagcataaagtgcattttttgaaaccatggatttgttaaagtcattttgtcttatgatgttttatggaactaaacgtgtactagaccattatgagatacaaattaattttcatttaataatgggcctcatgacatgattctgtatatagaaagtgctgtaaaatacacacacacacatgcgcgcgcgcgcacacacacacacacacagctagagctcataaatgaattcatcaaagttgcagggtaaaagatcagcacacaaaaaattagtgcttttatacaccagcaatgaacaaatgaaaagaaaatttcttttacaattttcaaaagaagaaaatacctagtaataaacttaagaaagcctttcctggctgggtgcggtggctcacacctgtaatcccagcactttgggaggtcaggcgtttgagatcagccttgccaacacagtgaaacctcatctctactgaaaatacaaaaaattagccaggcatggtggggggcacctgtaatcccagctactcgggagactgaggcggaagaaccacttgaatctgggaggcggaggttgcagtgagctgagatcgcaccactgcactccagcccgggcgacagtgcgagactctgtctcaaaaaaaaaaaaaaaaaaaaaaaaagcctttcccttgtacactggctaatttacacttgtacactgtatttttagatgtgtatattgaaaactataaaactttgctgaaagaaattacagaagacttaaagaaatggaatgacatcctgtgttcatggattggaagatttaatattgttaagatggcagtatagcaacctacagatcctgtgttcagcatttctcagaaaaaaatggactgggagaccctaagccactggcccttttttgcagaaattaaaaggctgatcctcaaatgtatatggaactggcagggaatagctaaaatagtactgaaaaggaaaagcaaagtgggaggactcacacttcttaattttaaaacaaagctaattactacaaagctacagtaattacaacagtcgagtactagcataaggatagacgtatagaccagtgaagtagaattcagagttcagaaataaagcacaagcatctatggccaatttgttttcaacaagggagccaagaccagtcaatgagaaaagaatagtctcttcaacaaacagtactaggtcagctggatgcagaagagtgaagttttaaccctacagcatggataaaccttgaaaacattaggctaaatgaaagaagccaaaacaaagactacataacttacaattccatttataagagatgtccagaacaggcaaatcatagggtcagaaaatagattggtggcagccagcctgagaggagggggagtgaggattgagacaacgagtattgggttgctttttagggtgataaaaatactctaaaactagatagtgacaaaagttgcacaactctgtgaatatacttagaagcaatgaattgtatactttaaaagtgaattttgctgaatgtgaattgtatctcaaagctataattttgttattttttaaaatgggaagcgcaaggatattggctcaggggagcggcaggatggctgtcctagaggattcggttactcagctctataatgaatacatgtttttctcctagaaacccaccttacctgtgatctagaggttctgtgtagactgttaatgaatggcgatgcatgtaatggctgcctgtccctaacatacccaaataccccacacaagagtcagcactcattagaatgtcatcttatattcacatgacaccgatttgtctgaaatatttggagtgggatcaaaggaaatcttgtaatctagatccccttgggctactgaggatttctttttctatctaatgattacttttctacattgatgaaaaaattctagattcttctaaagtttataaatgtccattactttgtgatcttagtcatgtgcacttttgtcttattattattattttgaggcagggtctcagtcacccaggctggagtacagtggcatgatcttggctcactgcagcctccatctcccagcctcaagggatcgtcccacctcagcctccagcatagctgggactatgcctgccaatttttttttcttttaagagacgaggtcttactatgttgcccaggctggtctcaaactcctgggttcaagcagtccgcctgccttggcctcccaaagtgctgtgattacaggcttgagccaccgtgttcagccttgacttttttttttttttttttgagacagagttttgctcttgttgcccaggctggagggcaatggcatgaactcaactcaccgcagcctccgccccctgggttcaagcgattctcctgcctcagcctcccgagtagctgggattacaggcatgtgccaccacgcccagctaattttgtattttcagtagagacagggtttctccatgttggtcaggctgatctcaaactcccgacctcaggtgatctgcccatctcagcctcccaaagtgctggaattatacagacatgagccaccgcgcccggccagctttgacttttgtcttaaattattacatcttgtcacagaggtcaggtgaataaatggtcgatgggttctcccagcttaatttcagacttaaattgtttccatgtggagctttcacttatacctcttctcagaggtaccgctgttgtgatagcacattgacgttcagctcttatttgcttttatatttttcacattttgaaatgaagaatattttttcttgtgctacaatacatcagtaatactggtggttttctctctccaaacactgattttttaaaaaaatgaagtttaagatgccaggtgtggtggctcatgcctgtaatcctaacactttgggaggcagaggtgggtgggtaacttggtgccaggagttcaagactagcctggccaacatggcaaaaccctgtctggacaaaaattagctgggtgtgatggcacatgcctgtagtcccagctactcaagaggctgaggcagagaatctcttgaacccaggaggcagaggctgcagtgagccgagatggtgccactgtactccagcctgggtaataaagcaagactctgtctcaaaaaaaaaaaaaaaaaaaaaaaaaaagttgctgggttcgttggcttacgcctataatcccaacactttgggaggccaaggtggtggatcacttgaggttgggagttcaagaccagcctggccaacatggtgaaaccccatctctactaaaaatacaaaaattagctgagcatgatggcgggcacctgtaatcccagctacttgggaggctgtggcaggagaatcacttgaacctgggaagtggaggttgcagtgagctcggagggcgccacagcactccagcctgagcaacagagcgatactccatctcaaaaacaaaagggagagatgacaaattgtattcggttttgtaagttcagagtgcatataactttttctaccaagcatatcatactttgaattatagcctttattctgcatacctggctattcacaacccattattcatggtgagcttgaaggccttgttcaaaaagcagctccttccacagctgtattgtagtctgatcttgtaaatgcactagacataagtcctgccgaaggataatcttgccatgattgtttttagcaaagtaaaacaccaggcatgcctgcatcctactggctctgacagacctctactttgtcttgtgtattttaggctttaaaggagatagatgaagttggggacctattgcagctgaagtattcccgtcatcggttggtacctctactggacaggccctttgacgagacgacgtatgaagaaacagaagactgagcctttttggtgctccctcagaggaactctccctcacccaggacagcctgtggcctttgtgagccagttccaggaaccacacttctgtggccatctcacgtgaaagacattgcctcagctactgaaggtggccacctccactctaaatgacattttgtaaatagtaaaaaactgcttctaatccttcctttgctaaatctcacctttaaaaacgaaggtgactcactttgctttttcagtccattaaaaaaacattttattttgcaaccattctacttgtgaaatcacgctgaccctagcctgtctctggctaaccacacaggccattcccctctcccagcaccttgcagacttgggcccatcaagagctactgctggccctggctccgcagcctggatacttacctggccctcctccctagggagcaagtgccttccacttacttcccatccaggtctcagaggtctcaaggccaaccttggaatccttatttaaccattcaagtaatcaacggaagttttcaccctttaatcttaagtttagccttttaagaaaaacagtaagcgatgactgctgaaaggctcattgtgtaatctcccaagggtttggtcttattccattttcttctggtcaccagatgatttcttcctttaccatcaaatacttcttcataatggtcacagtctgaggatgtgcgcaaattctggttcttcccaagctctaaccgtaacacgtcccaccccctttttaaagcacttactgttttcagagcacccatatcccaccctggtgagaaggccactctcacatctgagtgttgggtacaaagctgctccgtagagtgatgtgcactcctggtgggtgaggggcaggggcagtggcagtgtgcaaagaattgattactccttgcagagcctgtggcttgcatttcctactgctttctacgtttgaaaattatgacagtctctggctaggtctgggtccagattaggatttaaactgataaaggaaactgttggtaaatcctctgctcagaaagcatttatcatgttcctatttaaggattaggtttattaatttaggcctcttagaagctaacccacttaaatattactcttctgaatgctagttctcttttattcttgatgtcctaagtcaattgaatctggcatctggggctagggtctgcctgtctacatattttttatttttttctgagaaattctgaacacatagatctctttcctaaactgacattttctattttgactgttttcatactataaccaggtaaagggacttctttcagagagctttatactgcctgaccaaagaacaaatctgaaaatcaccattttaaagttattttttcagttgaaccaaagtttaagtgaagaggacttttggcatattatacccaggatcagtttgtctttttgtatccatcaagtattacaggagaaggattgggaacagaatggaaaaacagtgtatgaaagtcatgttacaggccgagtgcggtggctcacacctgtaatcctagcactttgggaggctgaggcaggtggctcacttgaggtcaggaattcaagaccagcctggccaacatggtgaaaccccgtctctactaaaaagacaaaaaattagctgggcgtggtggcgggcacctataatcccacctacttggtaggctgaggcaggagaatcgcttgaacccaggaggcggaggttgcagtgagacgagattgtgccactgcactctagcctgggtgacagagcaaaactgtgtctcaaaaaaaaaagtcatgttacacatttaagtttttgaaattgctccttttatcggtaaagattctcaatccaaattctcctgggtgtgttgtcatcagctgtgatatgtttgtgcacattacgtatagcagaggatgtaagcaatattattgtttgtgaagttttgtttttaatgtcttgagtatgagttatgtttagtcactgtcagcatctgagaactttaataagcccttgagatattccaaagttttattttacttttttaaagaacagaaaaagatgaatgaaagaaccaaggagagatgcagagactatatttagcatgtataggttaaagtaagaaggaggttgtggtaactaaataggagtcctataaaatcaaatacattgtcaaccttttctgcacatctagtttcctaccatagaatcccactggaataccacatagcttttgcactgcagttactatttactaatgtaaacgtagggtttgtaaaagtcacaaacttataagcaatgaacttacctgctagtctttttattttggcttgcatgaagtcactgcaaattcaaatgtcagtaccggcatttaaaatatatctatatcactttgttggtacaaagttatttcaagataagtgtaattttgttacaagtttattttgaagagacaaatctcctgtgatctatgcaggacctctgtactttctaaagaacaaaatgttatgtagacattatacatggttggttgtctcttcttgaaactgtaatgtaaatctagggtccagtcatatcctaggtatcatcatttatccaagtacttggaggaatacaagtatatataaatacagtcattgagaataagtcgatttgaggcatacaagagtagtttcttacacagtttaacacggcctgattcaagactctgataggattcaaacagataccggttaaccatgactaccaaaactgatcatctgagtcgattgatagaggtgtgactagtccttagcactttttctcattcctctttttattcagcattgctgttacctatttcaggtttataagacctctttcagcagatcacatcagaagccaggaaatgcatagctaggagatgtcaaaagcccatatgaggagtggaccaagcagcagtggcggtttctcctcgcatctttttttttttaagctttaacttagcaggggcatggactttatagcactttttcaactttttgctttgctttggataagaaatccttacctttaaaaaaagcttctagtctccataacccccaaagtactgcttatttgtttgaagaatccagccatcgtagtgctttagtcactatcgtaaacattcatgatagggcaaggattttaaaacaggattcttgcttctgtagtcatcaaggtgaacagaagcatcctacacaaccactaagggctctatgtttgtgtcatgcctcttcaaacaccaaggagttgaacatgcttccagtgatttgtctccgtaatgccttcttcctttatttggcctttctttctttctgtaccttcaagttcttgatttttaaaattccaactctagagaaaaccaatatatggtggtgctgggctttgaagatagcatatcagacgccttggttctgtttgtacacttagccttacatttcaggaggaggcttttcattaggggcttaagctagctcctttggcttttaaaaaaaattttttttcaaatttcttcattacctaagggagcctgcatctaaatttctcaactagttcagcctagctgaattttctagtgtgttatacactttgcttccttcttattggtgaaaaccagggggatgagtggcttccatggagagatttcctgatttctcagggaggaaaaaagtgatgacatttaccactacttttatgtttttcccctttttccaaattgataaggatttctggttcctagtgatccgggattgggcaacagtgcagaactgccagtcatgccgtaggccgtgaagaaagaatgtgagtaactgttgttttgcaaggatttgtagggttatgggcagttgttgtttgaagcattgctatgacctaattcccaaggtatctttcctctcttggtgttctaggtaagccaatgagctttaatctctacttgctataaccgtgtgcttagaaaaagaggtgagagtagtggttttccttcaaactgtccacattcatgaagattatgaattgttaggacagccagggcaagatagaccctgtctctacaaaaatttttttctaaattaaccgggcatggtggtgcctgcctgtagtcccacctgtgtgggagaatcacttgagcctgggaggtcaaggctgcagtgagccatgattgcacccctgcactccagcctgggtgacagagtgagaccctggctcaataagagggggaaaaaaaattgttaggagctgggtgcggatgcagcctgcaatcccagctacttgagaggctgaggccggaggattgcttaaacccaagaatttgagcgtagcctgggcaacacagcaagaccccatctaagaaaaaaatgttttttaaatcagcttagcccaaaggggttgtgaatggggaggtataaaaagcaaagattattttttggctactaagccaagaacttacagggattttttttttcagtcccagaacctacagataccctgctacttgcttcacgtggatgctcagtgcccagcagccatcttaatacattaaaccagtttaaaaaataccttccatgtggagaaaaacatgtctttttctcgcctcaactttatccacatgaaatatgtgcccatggctgggcgcagtggctcacctgtaatcccaacactttgggaggctgaagcaggcagattgcttgaggccaggagttcgagaacagtctggccaacatggcgaaacctcatctctactaaaattacaaaaattagccgggcatggtggcacatgcctgtaatcccagctacgtcaggaggctgaggcacaggaattgcttgaacccaagaggcagaggatgcaatgagccaagatcacaccactgcactccagccttggcgacagagggagactctgtctcaaaaaaaaaaaaaaaaggtgtgcccaggcccctagccattgccatgtgcccagccagagagccaaattagagggctggcttccctatcacacagaataaatgctagtgctagccaatgatccctttgcttttaatgtatagaaaatactgttgttccttttgtcatttccagtgacatctgttttctaagcagctcttttctagggaggaaaccaaaggggctaggttaagaccctaatagaaatgttttttctaatctctggtgagtctggaagtgtcacattcacagtccacccttgggagtggcttggtggagctggggacaaggttttgtttactacatagtgcacatgataaatggccttaaactgtgattctttctggtaggataagttataataaactgaccctaaagaatgcaatggcttttaaactgcagttactgtgttcttaatgaagcaatacccaaagctctgttcttttggagcacttgaggggagcttgaatgaaaggtgcagataagagcagtaccttgatcttatgctttctgagtgtcctgccttgttgccatctgcatggatgagtgaatgcttctatgcacgaggagactcaagccaactcagagtctgctttttccaacgctcttcccaggtttcttttgcaaagcttggtcatttggcccaggtcttcctggaaagtggagtacatgtcactgactagggtggcgtggtgtctttacccttaacattaagtcttgttacctcagtgatgtgaagccaatggttggaattataaaaagcatccttgctggttcttcacaggacactggaacccaccctgtcaattcagctagcatgtccacacagtcttgatgatccctctctgtaacaggcagctaacattaagagaagggggaaagagaagaagagagcaatagcttatgggagagctgagatcttacttcgttgacccatatttttcccctgaccaagttacctgtaaactggaatttgcaaggggatgctgtgatgataacccctttctattgctgtaatgttcatataacctgggaaactgagagaaggggatgtgtaaataaaagcttaaacattttagtaatgtgttaaaatgtcactctctcttaccctgtttcccttttttgccagatgatgatttttttatttttattttgtactttactggatgactgtgaagcgatgagtattgggttggggtaggtgtgttgattttgagagtgcatgttaagaactgaaggggaactacttgagatgacttaagaagcatcccatgcaaatatcttgttttgccctaataaaatattcagaaagata

SEQ ID NO: 10 - DNA, 128417 bp, Homo sapiens
aagtggagacacgtgctttggcctgttggaggggaaacccgctctcgcctcctggtggtcgccgactcgcagtccgcaggatgactcagggcagccctgaccacagttccgccgccatcggccctagcctgcggaattgggctcgccccgggacgataacagagctctgccgggggctggaggcactgaccgggtgaccagagacccagagaccagaccccctccacggcgcccgggatttcggggacggcttctcccatcgcaagtagggcttggacgggaggcgacaaaagagaacttggtccgcacacagccaccgaaattggaatgaggagctgtagggaggccccgtagccagcagaaaagcattggggtccctggctgggttagcccaggtttctaggagtgtggtaagcgtcgaatgacttttgtccttttaaagcacattatgttactttttcccccaaggtttcaacagaaaatgagaaatatcccccgacgattggctgaaaacatgcagcaaccactattttcttcctgcccctcgttgatgagagcattcgaagtgacctcagcagggcatccaggtatgtcaagcatggtgacaaagtgttcaggtcagacggtctggggaaaggctcctgtgttgttgagcctgccaagttgtgggtgcagcatggtaccaggcagcccaaccctgacctaaagtaaattcccggaagaagtctttcctgggttttgaatttgcagtaacaggtgtgagcattctagcagcagtttgatgatcatgtatgatactgcaaacaggacctacgtttaaagaaaatggttgtagttagtatcagagagcccttgcttttcaaaacttcataaacaatgttactgtcatgtctttcattcaataaacatttgttgatacattggcctgacatcatgttaaatgttacggatacagagatgaagaaaacagtcatggcccttgttctctgggaactacaacccagttagggagacaaggttaaatgatcacacttaagagggcataattcagccaggtgcagtggctcatgcctgtaatcccagcactttgggaggccgaggcgggtggatcacctgatgtcaggagttcgagaccagtctggccaacatgatgaaaccccatttctactaaaaatacaaaaaattagctgggcatggtggcatgtgcctgtaatcccagctactcaggaggctgaggcaggagaatcgcttgaacccaggaggtggagaggttgcagggagccgagatcacacacaccactgcactccagcctgggcaacaagagcaaaactccgagaaaaaaaaaaaaaagtcataattcaggccgggcaccgtggttaatgcctgtaatcccaacactttgggaggccgaggcaggcagatcatctgaggtcaacagttcaagaccagcctggccaacatgaaattagctgggtgcagtggcatatgcctgtaatcccaagaggctgaggcaggagaatcgcttgaacccgggaggtggaggttccagtgagccgagatcgcgccactatactgcagcctgggtgacagagcaagactccatctcaaaaaaaaaaaaaagggcataattcaagccaaagtgagtgctctgaaggaagggaacgtaagaacatatatcccaaggatctggcgggtgtggtggctcacacctgtaatctgagcactttggggtgccaaggtgggaggatcacttgagctcaggagttcgcgaccagcctgggcaacatagtaagacctcatttctatgttttttaattattaaaaaaaaaaaaaaaaaagatccgatggagactagaaggcttttctgaggatgaaaccctcgagctagaatctgaaggatgggtaaaagtttgctgggcacagtgccccagcaggtgcagctggtgaaggaactgaaagaaggcctttgtagcccagaaagcaaagtggagaatggtgggaaatgaagctaaaaaggtgaagagctgggcgcggtggctcacacctgtaatcacagcacttttggaggctgaggctggaagattgcttgagccaaggagttcaagatcagcctgggtaacacgagaccttgtctctatgcaaaatcaaaaaagtaagctgggtgtggtgacccatgccagtgatcccagctacttgggaggctgaggtggggggcttaaagctgcagtgagtcatgatggtgccactgcagtccatcctgggtgacagagtgagaccctgtctcaaaaaaaaaaaaaaaagatagggaaggccaggccatacagggccttgcggctcaggcgaggatgttggtctttggcctaagaataatgggataccattatgggatttttggggtttttgttttgttttgttttgtttgagatggagcttgctctgtctcccaggttggagtgcagtggtgtgatcttggctcactgcaacctccacctcccagattcaagcgattctcctgcctcagcctcccaaatagctgagattacaggcgcacgccaccatgcccggctaatttttgtatttttagtagagacggggtttcatcacgttggccaggctggtctcagactcctgacctctggtgatctgctcacctcggcctcccaaagtgctgggattacaggcttgaaccaccttgccctgcccctttatgggttttatgtaagaggatgatacagacaaatctgtaattgcaaaagagcactatgtgcagaacatagatgatgtgctgtccagcagcactttctgcaatgatggaaatggcctatctgaccattttatgctatccagagcagccgcaagccacatgtagctgttgagcatttggtgactgtgagtccacattttttattttaactgtaaatagtcacatgtggctagtggctgctgtgttggtctacagtgcattagagggagcagtgccacctttccgggagtcgtggcacacagaacccttttgcatctcctgctcttcctcccgtcttggctgaaggttgagattatgcttctgggagaaccttcatgttgatttctcctggaggtctccaacagagacaataacagtttatgaaattttttttttttttttgagaaggagtcttattctgttgcccaggctgagtgcagtggtgcgatctcagctcactgcaacctccgcctcccgggttcaagcgattcttctgcctcagcctcccaaatagctgggattacaggcacatgccatcacacccggctaatttttgtgtttttagtagagacggggtttcgccattttggccacgctggtcttgaactgacttcaggtgatccgcctgccttagcctcccaaagtgctgggattacaggcctgagccactacacctggcctgtttatggaatgtaatattgattttctcggctgtagtttagcctgctccttcatgaagcagcgtcttccttctgtctttgcctgttttttgttagcacacagattgagaagtgacatcatcagtgcaattaagtacctacaggggtaagcacattgagtcatacgccgtggagggaatataaagaaaagtatggtccctggtgttaggggcttagaatctagcgatgtcagtaggcactatggaacaacaggaaaggacattttctgttgaacccttcaggggatgggaccctctcggggaagtaaaggctgtttccatctgctgaaatgtgacaaaaggcgggaagcatggaagaatgtggggagctccctagtgagagctgtactgagtaatatgtggctggagggaagggaagaaaagtaaagttggaatatgtaggttgataaccaggttgtagggcccttgaatgtcaaagttcaagtggcttttttaacaagcaggtttctaagggcaacgtggtggtctacagatgacagcctggagaaagatgggttagagccgggcgtggtggctcacacctgtaatcccagcactttgggaggctgaggcgggcggatcacctgaggtcgggagttcaagaccagcctgaccaacatggagaaaccccgtctttactaaaaatacaaaattagctgggcgtggtggcacatgcctgtaatctcagctactcaagaggctgaggcaggagaattgcttgaacccgggaggcggaggttgcggtgagccgagatcacgccattgcacactccagcctgggctaaaaagagtgaaactccgtctcaaaaaaaaaaaaaaaaaaaaaagaaagggaaagatgaggttaggaagtccttgtgatgtctttgagtaggaggtgaccagcccttggctcagtggtacctgtagacttggaagaatgaggggtggctgggggcccattccccgcagggcagaatcccagggtacctcccatgtcatgttctaggtggaaggtggattttagattttagagagtatctcatggagctcacagttttaaatattcagacttggtaaagtagaataagaactgatgcatatacttttctttgcaggtcagtttctggaagacttgtgtgtgtgatgaatgaatatctggttttgtctctgctgggcctgtgtgcctggaaaggaattgttttggcctaggatcatccaggtttgtttggtttagttcttgaccacatattttttgaatggtgactgcttaagaccctgttgtgtatggctataaatagatacacgccaaggtgaccacatactctgtggttcctgtgcccgccggccatgtgtctgagtgtgtagcctctcatcatctaaaggaactttggctgcagaggggaggcctggtcccatgggaagttttgggagcgcagcagcaggtgggttcaaacgacccagcaagtgcctccttagcacttagaggcggaggccaccacgttgtccacgtggggtttctgatcccagctccccaccagcctgctggacctcgggcaggtccctccctgtttgtacctccattacttcttcagtaagatggggacactgaagatgaccatgcctcccaccagattggtgctttttttgttttaataagggacagagtctcactatgttgcctataggctggtctcaagctcttggcctcagttttcctgcctcagccttcaaatatgctggggtgacaggcatgagccactgcactggcccagattggtacatttgagggttaaatgagcaaatcctataaagcactcaggagagggctgtggggtttgggctggggcctgggagcactttagacgtggtagctatgttgttgtcacctttctcctctttcaaagcattttttgtttgtttgtttttgtttttgagacagagtttcgctcttgtggcccaggctggagtgcggtggtgtgacctcggctcactgcatcctccgcctcccgggttcaagtgatgggattacaggtgcctgccacaacgcccagctaattgtttgtatttttagtagagacgaggtttcaccatgttggccaggctggtctcgaactcctgacctcaggtgatccacctgccttggcctcccaaagtgctgggattacaggtatgagctaccgcgcccggcacaaagcattttcagctgtgaaattccctggggtgctgcagtagaggaaggtttggggtcttgacgggtgctatttgccacggaaagatgccttcctgctcccagggcaggagagccgaggtaagacttactgtaggctgtcgttttttttgtttgttttttgtctttgcgatggagtctcactctgtcgccaggctggagtgcagtggcatgatcttggctcactgcagaacctccacctcccaggttcaagcgattctcctgcctcagcctcccaagtaactgggattacaggcacatgcccccacaaccagctaattttttatttttagtagagacagggtttcacatgttggccaggctggtcttgaactcctgacctcaggtgatccgcccgcctcggcctcccaaagtgctgggattacagacatgagccactgcgcccagccaggctgttgtttttttacctccttgtttgcacaatttgggccactcacaagagtgtataccctgtgataaacagttacctacattctcctctgcatgcttgtctttagaggaaggaaatgtattaattgcccaaagtaatatattgtgttaagatgtgatatatactggggaaaaaaaaagtgtatattgacatttctggaataaaccactttgattcccagttactgactcgttctcctgtgtggtgtctttcctgtatgcagaaggccggcttccccacaggggctgggggtgacttgtctgtccttggaatatgagtctttgcaagcagctgctgcccatgtgcacagttcctcgaggagttggttcaatcttggtttgggagtttgattggaaggattagatcctaggctcccctgagcagtaacatcttatttatagcgtggaaaatggacagagctgttgatacttaggagagctttcctcattatcaccccgaggagagtgcctgagtctccaagaggtcattgttggtctgcaagctcttaaggcagaagagtctgccagtaacagggaaatcaggacaggatgggaatgagtgtcccaaggcagtgacagaagctgaggctgaaccttcccaggaatcctccaccttcagggtgccaccttgtctctgcatgaagtgtctgcagacacactgcctgaaagtggctccttaacaatgaacctgcttgccttttctctgtcactagaccccaagacaatgaagagccttcattggctgggcatggtggcttgcgcctgtaatcccagcactttaggaggccgaggcgggtggtcaggagttcgaaagcagcctgaccaacatggtgaaaccccatctctactaaaaatacaaaattcaaccaggtgtcgtggcaggcacctgtaatcccagctgctcgggaggctgaggcatgagaatcagttgaacccaggagacagaggtttcggtgagccaaggtcacaccactgcactccagcctagaagacagagcaagactttgtctcaaaaaaaaaaaattaactaattactgaaataaataaacagccttcactaattctcctacacagtaatgggcgcgctcctcctacacaggactggcatgctgggcatctttctgggtgatgggagggaggcctagactccatgggtggaggcctaggaaggttttgtgtggctgtcaggaacattccctggccttggctgtctcctgctgtcattcagttccagctccttgcagtcagtcttttttttttttttttttttaaatagagatgaggtctcactgtcttgcccagactggtcttgaactcctgggctcaggtgatcctcccacctcagcctcccaaagtgttggaatcacaggcatgagccatcacgcctggctacagatggtgctttcaatattagcaatggataattaaatatgtggttaagaagttgtatttaaggttaaaaatcactatgaggctgggtgtggtggctcaaacctgtaatcccagcactttgggccaaggcaggcggatcacctgaggtcaagagttcgagaccagcctggccaacatgctgaaaccctgtctctactaaaaatacaaaaattagccaggcgttatgttgcgtacctataatcccagctactcgggaggctgaggcaggagaaccgcatgaacctgggaggcagcggttgcagtgagccgagatagcgccactacactccagcctgggtgacagtgagactccatctcaaaaaaaaaaagtcaccgtgggacacaagccctgtatcagaaaaggtatagaaattaaagaacagttaagtcaagattttgaatttctctcttcgtccactagaggatgtaatccaacaccagactgtgttctctgatgtaacttggtatagagtttgggttttggggcttttttgttctgttttgatttgtgtaatttagccaagactttctgtgaccaaaaagttatgtctgttgtaacttggtacagagtttggattttggggtttttttgttttgttttgatttgtgtaatttagccaagactttctgtcaccaaaaagttatgcagaagattcatctgcggggctgggctcttagttacgaatctgtccggttgtcccagtggaatcagtccaggtgtcttggttcgtgataagtgctttccttggaagcgtttatcatgtcaggaaccaagcacaggcactgcacgtggagataagagcgtgttctaatacatttctccgttccaatgtactcccagtgccagctggtgagaacatcgggaaagattttctttgtaaggaatccagtgttaacacgtaccagtatttgaagtcccagacagtgtgcattaagggtttagaagtgtctctggcatgaacattgcttataacttgaaattgacaggtacttatcaagaccaaacaaagtttgcacaaagccagcacagttaagagtgctgattgtggccgggcacggtggctcacgcctgtaatcccagcactttgggaggccgaggcgggcggatcacaaggtcaagagatcaagaccatcctggccaacatggtgaaaccccgtctctattaaaagtacaaaaattagccgggcgtagtggcgcacgcctgtaatcccaactactcgggaggctgaggcaggagaatctcttaaacctgggaggcagaggttgcagtgagccgggattgtgccactgcactccagcctggcgacagagcaagactccatctcaagaaaaaaaatttaaaaaaaagagtgctgattgttagctggtgggaaagtggacttgctgggtgggggcgggggagtggggagaatgaccattctgaaagtgtaatcttcaacagagtactgtacgttctctggcttattagcccggtgaacagctttctgatggttttagttgaacaagtattgctggatatgttaaaatacagccagaggcaaaacatactccctcctctcagagaacttatatcccaggataggggagactggaaacaggtcattagaatatgcagaataacagatgagtgctatggagagaaagacagcagccccactacggaggagcacgggatggggtttgcaattttagatgggtggcctttaaccaaatccttcagtgagagtaagtcacatgatgaccaggaagagcaccccagcaggggaggcagccagtgccctggcacacaagcaaaaggagttgatgagagggctggggggctgaggccagatctcatggggcctcacatggaggaaagtgtgggacttctgccttttctctgaatagtgtccgtagcttacatattctatctactcttgccttttaggaaccatttttccctctaatggtagtttacgttagaagtatttcctgttctaggcccggtgcagtggctcatgtctgtaatcccagcactttgggaggccaaggcaggtggatcacctgaggtcaggagttcgaaaccagcctggccaacatggcaaaaccccatctctactaaaaatacaaaaattagtcaggcgtggtggtgcatacctgtaatcccagctactcgggaggctgaggtacgagaaatgccagaacccaggaggcagaggttgcagtaagccatcgtcgtgccactggacttcagcctgggcgacagtgagactgtctcaaaaaaaaaaaaaagtatttcctgttcctacacattggcccattgagaggatcccaggtctatgcatggggacaccgtctttttggctcatgttgagccacatgtcctgcagtatttggaagtgttctgggacagactttgttcacataaagatcgcgtgcccttcactgcagtgatgaagctggagactgtctttctctgtgacaaggacctcagccctggatctgtcctctcctagtgcccacctcattcatggagctcaccccgtggttttggaattgtttccttccctgtgccttagcttccctgaacactacttctacactagctccttgagagtgggagccctggacttattgctttttcaacagagtagatatgtgtgtttcatttatatcagtatttaaattgctagcaacaagaccacaaaaactacattctcatagaagcctgtttgggtttgatgtggttacatgtgattaatgtatttgaaatagttatttgttgtgattttttttttcagatcaattatgcagctacagccaaaaccaagttctttttattgcaatggtaatgaaaggagccccgtgtaagtcactggaaggtcacatgttcacagactgtcagctgtggagggttatgtaacagtggttatgcaatgccacgttagaactacagcccgagcagcaaaacatttagataattttattgaattaaaataagacttccactctctttgaatgacaaatcccttttaacaaaaccaagacttgggttttaatgttgactcccacacgaggctccgtaagccacattttaccttctatgcgtggctggccccattgagtagatttctgaaagtcaaatttctgacatgagcctatttgaaaactttgctcagttgtcatcttctatcaggatgagttatggacgaagccccccataaatcctaaggcacatcttgaagcccctaaaatccaaaggcatggccgggctcacatctgtaatcccagcactttgggaggccaaggcgggtggatcactttgaggtcaggagttcgaggcaagcctggccaacatggtgaaacctcgtctctactaaaaatacaaatattacccgggtgtggtggcacactcctgtaatgccagctacttggaggctgaggcaggagaatcacttgaacgtgggaggtggaggttgcagtgagctgagatcaccccactgcattccagcctggatgacagagtgagactctctcaaacaaaaacaaaaaaaatcctaaggtacgtgagtctccttcactaatgtactgtctttgttccaagatacttcaccccttcgaaagttaacggggaagatcaaaaggaggtattaagagatcaaaatgaaataaaggcttcatgcgttttttgttgtttttttttaacatgccccagcattacaacaaaaacatgtctttttgtttaaaaaaattttttttcccaaagtaatacatgcattagttcaaaaaattcatagaactaaaaggcttctaacactaggctaagcttccctgctctggcgctcccagcgggagccattttccattccttcagcttcgctggttttgtttccgaggagcgggcgtgctgcgctgcttctctttgagtcatctgggtcctcgcctgttgactttcttcctggtagatgtggactgacctcttcctggtagatgtggactgacttctgcctattcaccctctgcttccccttctgcaccctccgagcactgtggtcatctgtacatgcggcattcacgttagtgcgcatgcgcaaaaggtgcctaccgccctgcgctgcagtgtgtgcattctgtattgttgtccctgttaatttccccttccttggctggctttttctttttttttttttcttttctttctctctctctctcttttttttttttttttttttttttttgagacagagtctcactctgttgcccaggctggattgcagtgctgtgatctcggctcactgaaacctctgcctcctgggttcaagcaaatctcctgcctcagcctccagagtagctgggactacaggcgcccaccaccacgcccggctaatttttgtatttttagtagagacagggtttcaccatgttggtcaggctggcctcaaactcctgacctcaagcgatccacccacctcggcctcccaaagtgctgggattacaggagtgagccaccgcgcccagcctgggctttctctgaacctgctgctaaattcttcccacacttcctggtggcctctcagcgtaactttacgtaaggtcaatcaagttaatttatccattccaatttttttcttagatgagtgagagaagacttttcatacaattgattaaagttttgttacaatattgtatgcaggggtcaggctgtagtagtccaattcataagttcacatttaggtagggatattttataggaaaatataagagctggattattgttgttaggccaaatctagagtcacaggctgatggttctgacaggcagctggttgggtaactggtttcccagaaaactccttcccaatcttgccagtctctacccagaagcaagttatgaatttattaattatatcaggtagaaagggctctgtcccaagcctggtttagtgttaagcatatagtccctctcttttttttttttgagacagagtctcgccctgttgctctgttgcccaggctggagtgcaatggcacaatctcggctcactgcaaccccagtctcccaggttcaagcaattatcctgtgcctcctgagaagctgggattacaggcgcacaccacgccaggctaatttttgtatttttagtagagatggcgtttcaccatgttggccaggctggtcccgaactcctgacctcaggtgacccgcccacctcagcctcccaaagtgctgggattacaggcatgagccactgttcccggcccctcttttttgaccagacataataactgtcatggttaaatccctgtcttggttcagaaggcccacgttgttgcatttttggtctaagaatataagtgaatttgttgtctagttgagtgcttcccaaacaatttgcaaaggactcccctggggatcccatcaaaatgcagcttctggtggttctgtgggtctggcctgggctggagattcggcagttctcacaagctcccaggccatgctgatactgctggtctgaggaccactcggtcctttctcagggatggtgggacttaggcgtggacttactttgtagaacacatcatcctgactattggtggtgctcatttacacgttgatgtaattcctttaaaccagcgtcctgtgttagggaaaacgttcccaacagtcccgttgcggtcaccatttcttgtagtttattcaccagggtctctatgtcatgcaagctgggttctctgaggtctcttatttacataggtacatcaagaggcaatgattaacatccaaagacctctttgctatttgcttaacaaaactgcagtcatctgttggggaaatataatttaaaaacaaaatcccccaacccagaaagcctcgccacaaaagtaaaagcaaaagaaaacaattttatgattgaataagcattaaaccaaaacgcgttgagcatcacaggcagcccactgaaagaactgcagagacaaatctcccgctttgatacagctaagtggatacagcccatgcactgtgtaagtgggttttgccatttagaatcaggtgacagctgaagttgggatcatcccctccggaaaacagttatcttccttgatgattacagttcacgtgggtggctcaggtccttggggaaacatgacttgagttgggggaaactggcaggagactcatttaaccacttgaaagctgtatacacttttgaaaaggacagagaaagaaattctgaaaggatatggaagtgaagggtatcttcccttgttttctttctcttcttttttctttttttcttttttttgagagggagtctcactctattgcccagcctggagtgcagtggcgtgatctcggctcactgcaacctccccctcccaggttcaagtgattctcctacctcagcctcatgagtagctgggattacaggcacatgccaccacaccgagctaatttttgtatttttagtagacacagggtttcaccatgttggccaggctggtctcaagctcctgacttcaggtgatcctcccaccttggcttcccaaagtgctgggattacaagcataagccaccatgtctggccttttttgtttattttaaagacagagtcttactttgtggctcaggctggagtacagtggtgtgatcatggcttgctgtgacctcgaactcctgggctcgagggatcccccctactcagcctcccaagtagctgggactatacaggtgcatgccaccatgcctggctaattgttttactattttttagtagaagcgaggtctcactatattgcccagactggactcgaactcctggcttcaagtgatcctccacctcggcctcctaaagtactgaaatacaggcatgagcactgcttggcctgaaatgatttttctttcttttttttttgagagggagtcttcctctgtagtccggtctggagtgcagtggcacgatctcagctcactgtaacctctgcctcccaggttcaagcaattctcccacctcagcctcctgagtagctgggattacaggcacatgtgaccatgcctggctaatttttgtatttttagtagaaatggggtttcaccatgttggccaagctggtctagaactcctgacctcaggtgatccacctgcctcggcctcccaaagtcccgggattacaggcatgagctaccatgcccagccagatttttcttttttgttgttgttttttttttgttgttgttttgttttgtttttgagacagaacctcaccccaggctggagggcagtggtgtcatctcagctcactgcaacctctgcctcctgggctcaagcgattctcctgcctcagcctcccaagtagctgggattacaggcatgcgcccccatgcccagctgattttgtgtattttagtagagacgatattttgccatgttggccaggccagtcttgaactcctgatctcaagtgatcctcttgtctcggcctcccaaagtgcttctccatggcagtagttactgtccccagcccttgcagtcatcctttccaatagtctctcctcctacgcctggatttgtttttcatttgacactgagctgccagaaggcccggctccatggggttatgaggatacaatgcacagcgggaagaccgtggatccaggcggcaccgggcggggtcccagtgccacctgcttatgacctgctccagagcctgtgcactcgctgaccctgccacctggcacgccctgcccctgtccttcccactccctcttgtgagtcagctcacagctcaataccaccagggaggccctccctctcttcccaccgtaaagtaggaaccccatcttcactttgtcccaagatcatcaaagcagagaccgtatccaaaggactcttttttgtatttacttttttttttttttttttgagacagagtctcctctgtcacccaggctagagtgcagtggtgcgatctcggctcactgcaacctccgccttctgggttcaagcaattctcctgcctcagtcagcctcctgagtagctgggattacaggtgcctgccaccacgcccagctaatttttgtatttttagtagagacgggatttcaccatttggccagaatggtctcaatctcctgacctcatgatccacccgcctcagcctcccaaagtgctgggattacaggcgtgagccactgcgcccggccttgtgtttacttttttttttttttgtctccctttgtgaacccagaaaatctgagacagttctctgttaatttagaaagtttatgtttttggcctggtgtggtggctcacgcctataatcctagcactttgggaggccgaggagggtggatcacgaggtcaggagatcaagaccatcctggccaagatggtgaaacccccatctctactaaaaatacaaaaattagctgggcctggtggcaggcacctggaatcccagctactcaggaggctaaggcaggagaatcgcttgaacccagggggtggaggttgcagtgagccgagattgcgccactgcactctagcctgggcaacagagtgagactccatttcaaaaaaaaaaaaaaaaagaaagtttttttttgtgtgtgtgtgtgtcaaggttgaggacacgtacctgtgacacagcctcaagaggtcctgaggacacatacccaaggtggtcagggcacagcttggttttatacatcttagggagacaggagacatcaatcaatatatgttaagaagtacattggttcggtctctggaaagccaggataacttgaagcaaaggaaggaagactcaggaagggagcttccaggtcacagattggtgagacgcggtttcattcttttgagtttctgatgagcctttccaaagaaggcgatcggatatgcatccgtctcagtgagcaggggggcgactttgaatagaaggggaggcaggttggccctaagcagtttccagctggatttttccttagtgattttgggggcccaagatattttcctttcacgccttcaactggaaagtccactccagggccatggtgactgtcttgtttacccctatacccagacagggctcaagtgtgtggtcagtgttcgtgaacaagaaagtgactctagcctgtgacatgctcctcgctgaccacccccccccccaccccacgtaaaaagagttcaaggaggtcccatttgcaaagtactgggtacctagtaagtctgtaatattataaattgtgcttaccaccctctttccatgatatagtcccattcccccatgttttagagaacattcagattaacctccgaaagattaaatgatggtaaggatatagtgcagagatgtgaactcctgtgtcagggaggaaaaactttaccctcatgttcatggttggaggcctgcaaattaaactgaccaaagaaagattcacaggagaaaagacttttaaacattcatgtacaccagagttcacagaaaaatgtgactcaaggttaagtggttaggatctggggcttgtataccatcttcatgaagcaggggactcttaggaaggatgaatgggcccagaggagcacaggtgggatttatgttagtcttgtgacaacagctgtttaggtgattgcttatcctggtgagggactggtgagaggagacaatcttccctagtgcaaaactccctaaaaagccccagggaggggatttgtgacagttgaattattttgagagattctgtttttaagcagataagtagagttcagaggaaaaaaaaaaaaaggaaaagtcagtctggatatcagttcgtctacctaattttgccacgaatcaaggaaatcaccctgtactttccttctccgtggccaggggacattgaaattatttggttctggcagggcatggtggctctcgcctgtaatcccagcacttggggaagccgaggttggcggatggcttgagcccaggagttggagaccagcctgagcagcatagtgagactgtcttctacaaataatttcaaaattataggaggccaggtgtggtggctcacacctgtaatcccagcactttgggaggctaaggtgggcggatcacaaggtcaggagtttgagaccagcctggccaatatggtgaaaccccgtctctactaaaaatacaaaaattagctggacgtggtggcacgcacctgaagtcccagctactcgggagactgaggcaggagaatcgcttgaacccgggaggcggaggttgcagtgagccgagatcgtgtcactgcactccagcctgggcaacagagtgagactttatctcaaaaagataaaacaacaaaaaaattatgggaggctgaggcgggtggatcacctgaggtcaggagttcgagaccagcctggctaacatagtgaaagcccatctctacctgggcaacacagcgagactccatctcaaaaaataaataaataaataaattagctgggtgtggtggcccgcacctgtggtcccagctactcaggaggctgaagtgagaaaaatcacttaagcccaggaagttgaggctgcagtgagccctggtggcgccactgcactccaacctaggcaacagagtgagaccctttctcaaaaaaaataaaaaagaaaaattatttggttctcaggagagaaataggctgcgttctccttctccagccccgggcttttctttgctgttcaccttgctgactccccatgaatgcttgtatccggccaccagggtggcattttgcagaaaagcagtaatttgcatatcacctaaaagagttcacacatcccccatggggtgtaatataccatcaaggatcacttaagtactggagagaagcagctgatcaatgaagagctttaatgacttgagagtctggggcaggggagaatctaatttattcagccaaccaccgtggacccacaggggaaagaacaaagagccacaaacaaaaactcacttccacttcaggaccacttagcccacgccaggctccgggctccggggtccaggctccaggcaccaggctctgggtatttaatcctcagaacagtttctgagactggcatccttatctccactttaaagacagggatggaggctcagggacgatcacttgccaaggtcacacagctattgagcgctgggtaggaacgaaaagaaagagtctccttcgtgtagtttcaaactaatgaaaaatggaaaaaaattcaaaagtattttcagtaaacaaaaaatctattatatatttctattctatgttatgctagttaatgaagacatagatgaaaaggagagagggggagagagattgagaaagtccaagaaaacaggaaagagaaatgagatacaggagtccgtagaccaggtcagaagatccccacccacaacggtggatggcagaataaaccgcaacctcctcacacaccgaggggcttgggggattcccggtgacgtaaaggtgccctccttgactttcttgcaacaacagcaaaggcttctccacagtggcgttctaaaggtttcccacgcgctgacggctgagttggttttcaagctttacttggagcttgctgacactatcacagatgcctgaaagtccctttgagaaaggagccatgctggctggttttagcccacagtctctgaacacaatttggtattgactttttatttatttatttaaaaacagagacggggtctcactatgttgcccaggctggtctcaaactcctgggctccagcgatcctctcacctccgcctcccaaagtgttaaaattacaggtgtgagccactgctcccagccagtataaatgtttgtgtcagttttcagccccctgttccatgcccccccataccatgcgcacgcacacacacacggacttagattctccccatttgagcagctttcctccagctgtttgggcgagtgtgcagtgctgccatataaatgtgctcaataaagcccatggtgatgactcatctcggcactatctgagctccactttccccatccagagtcccgagtttctgcattaaacgtggtcgtcataacccagttctgtccggcaggaagcccttgctacagacctgggtccagtgtgtctcctctggacagttgggaggtggcagccctatggttcgtgtgggttcttcccacaggtaactgaaacagagggccagagggatgggaccccagcatagaatatgaatgtataggccaggtgtggtggctcacgcctgtaatcccagcactttgggagcagaggcgggcagatggcttgaggtcaggagtttgagaccagcttgggcaacatggcgaaaccctgtctctactaaaaatacaaaaatattagccagtcatggtggtgcatgcctgtagtctgggctactcaggaggctgaggcaggaggatcgcttgaacctgggaggcggaagttgcagtgagccaagatcatgccactgcattccagtgtggccgacagagccaggctctgtctcaaaaaaaaagaaacagctgacatgtatatatacattcatctctgtctccaaaaaaaaaaaaaaaaaagaatgtatatgtcatctgtttctttttttttttttgagacagagtttggttctgtcacccaggctgaactgcagtggcttgatctcagctcactgcaacctctgcctcccggtttcaagcgagtcttctggctcagcctcccaagtagctgggattacaggtgccagccaccacaccagctaatttttgtatttttagtagagatggggtttcaccatgttggtcaggctggactcaaacttctgacctcaggtgatcatcctgccttggcctcccaaagtgctgggattacaggcgtgagccaccgcacccagcctggggtttggctttatagactaagggctgaagaaagcagaaacagaacaaaaagcatattggtcatttcaaagttaaattctttgtaaggcaggaagagatacaggacaatacaaagacaacaagaaaaagataaccagtcacagttacatctcttttttcttatagagatgatatcttgctatgttgcccaggctggtctcaaactcccagcctcacgtgatcctcctgcctgggcctcccaaagtgctgggatcataggcgtgggtcacagagcccaccaagttactgtttgttgtaagggttaaaacagagggaacttcattagcatgctgacttgagactgaaactggcctccttgggaaattaggctgctatttctctcgcctgatttcttgggaagtcagataacaactcagtgttggtttgctgagcacgggtgactccattttgatttttgtctggtcttttggggcctagtgcaggagtttagtccaaaacaagggcctcctatgatttttgtttaacactctgaaagagaacgaactgaaactaactgttcaaaggtatattttctctttgctttctgtagcttttattgtttaatgctcagccttggaaggatatgccgttccatatgttctaaaaggaacaaaacagtctaccagtacttagcatctactcatttccagccactagagtccccagcctcaccacagtttagcagactgttagctgttacattaactaaatgcgtaaaatgctgatatcctaatatgcctctttttttgaaaatagcatcataattcatcataatttgtaggctcgcaaacattttcttggaatccactggactcccccatgctttttaattccgtactttctgtgcaagcaacacaatagttggaactgacttcaggccaactgcttccttttaacttttgtcatgttacccagaatagaggcatggagttgtttacccggttttcattgaggaacattctttgtcttccaaggaatacataagaagccttcctgtctcagaacaccaagctctgaaaggtgacttttctgctcgagtaattacactggttgactgagctccggaaaggaaacgcattcttggttgcagagagaggaagtggcttgcattgttggacaaaaagaaaaatgattgtttcctagggtcactgtcctcagcctccctttagagagcctggatcttgcagccatcagttatggaagtggctctgggaataactttgccctgggtgatgattgttgatgaaaagagtcgaagtgtataaaatatttgaagagatttattctgagccaaatatgagtgaccatggccagagacacagccctcaggaggtcctgagaacatttgcccatggtggtcaggacgcagcttggtttaaacattttagagaggtatgagacatcaatcaaatacatttaagaaatacattggggctggctgggcgcggtggctcatgcctataatcccagcactttgggaggctgaggtgggtggatcatgaggtcaggagattgagaccatcctggctaacagggtgaaaccccatctctactaaaaaaaaatacaaaaaattaactgggcgtgttggcaggcacctgtagtcccagctactcgggaggctgaggcaggagaatggtgtgaacccgggagtttgcagtgagccaagattgtgccactgcactccagcttgggcgacagagtgagactctgtctcaaaaaaaaaaaaaaaaaaaaaagaaatacattggggctgggcacagtggctcactcctgtaatcccagcactttgggaggccgaggcaggaggatcacttgaggtcaagaatttgagaccagccttgccaacatggtgaaacctcatctctgcaaaaatacaaaaattagccgggtatggtggcaggcacccgtaatcccagctactcgggaagctgaggcagaaggatcgcttgaacccaggaggcagaggttggagtgagccgaggttgtgccattgcactgggtgacagagcgagactctgtctcaaaaagaaaaaaaaaaaaaaaaaatacatgtgtgtggtccagaaaggcgggacaactcaaagccgggggtgggattccgggctatacgtgaatttaaagattttttggttgacaattttttggctgagtttgtctaaagacgtgggattgatagaaagggaatgttgaggttaagataaaagattgtggagaccaaagttcttttgaagtgttttttttttttttgagacagagtctcgctttgtcgcccaggttggagtgcagtggggcaaaagccacagacactcaaggccagccagtgcaagcagccggcagccgggaggggggctgaaccccaaaaagccacagggatggagctgcccaaggccatgggagcccacctcttgcatcagtgtgacctggatgtgagacatggagtcaaaggggatcatttggaactttaaggtttaatgactgccctattagattttggacttgcatggggcctgtagcccctttgttttacccaatttcttccgtgtagagtgggtatatttacccaatgcctgaacccccattgtatgtaggaagtaattaagttgctttcaattttacaggctcataggaggaagggacttgccttgtctcagatgagactttggacttggacttttgggttaatgctggaataagctaagactttgggagacagttagaaaggcatgattgtgttttgaaatgtgaggacatgagatttgggaggggccaggggcagaatgatacagtttgtccgtgtcccccacccaaatctcatcttgaattatagtttccataattcccaagtgtcctgggaggaacccggtgggaggtaactgaatcatgggagcagttactgccaggctgttctcgtgttagtgagtgagttctcaggagatctgatggttttataagggccctttccccgctttgctcagcacttctccttcctactgccctgtgaagaaagtgcctttcttcccctttgccttccaccatgattgtaagtttcctgagactttcctagccatgcaggactgtgagtccattaaacctctttacttataaattagccagtctcgggtctctcttcatagcagtgtgagaacagactaatgcaggggggctattatgttgccaatcacaggtatataataaaaagttaagaattataatttctaagtggtaggatttcccttaatccttttctcttatctatattttcagaagttttcccaggaatacacatactgcttttgaaatgagaagaatgaaatctcatttatagtctatattgacgtctttgcaatgttcattaatccacctctcaggacagccctgagaagtgcatactgttcctgaacagttaacagttacaaagatgaattgaaaagtatttaggcggccaggcgtggtggctcacacctgtaatcccagcactttgggaggccgaggtgggtggatcacgaggtcaggagatcgagaccatcctggctaacacggtgaaaccccatctctactaaaaatacaaaaaaatatggtgggcacctgtagtcccagctacttgggaggctgaggcaggagaatggtgtgaacctgggaggtggagcttgcagtgagccaagatcgcgccactgcattccagcctgggcgacagagcgagactcaaaaaaaaaaaagagtacttaggcataatgggtcatgcctgtacttctagcactttgggaggccgaggtggaaggatcacttaagaccaggagttcgagaccagcctaggcagcaaagcaagactctttctctacaaaaaaattaatcaggcatagtgacatgtgcctgtagtcctagctacttcggaggctgaggtaggaggatcacttgagcccaagaggttgaggctgcactgagccaagatcgtaccacttcactccagcccagacattagagcaagaccttgtctcgaaaaacaaaaaaaagaaagaaaagaaaaataatgctttttactaggatttttacaatatgtgaaacgaattctatcttgagaacagagtattggtattgccagtaatattttaaagttcttttgcttccaaaaaggaaggtcaccttccctgtctataagaagtcagtgccaccttggcccacagaacctcagattctcacctctgccttcccagccagccttcccttcttgggcacttttctgggacacaggctgaatgcacccaaaaatgcatcagcaggcttgataaagaacgagttaaggctgggctcagtggctcacacctgtaatctcagcactttgggaggccgaggcaggtggatcacctgagttcagcagttctagaccagcctggccaacatggtgaaaccctgtctctactaaaaatataaaaaaattagccaggtgtggtagcacatgcctgtagacccagctattcaaaaggctgaggcacgagaattgcttgaacccaggaagcagaggttgctatgagccgaaattgcgccactgcactccagcctgggtgacagagtgagactctgtctcaaaaagaaaagaaaagaaaaagttgaaacaccaaccaaggtaagttcatctcccttctaagccacccatgagacactgctggggtgaagaagtcactgtctgtggcaaaaaccatttagatgagaagtggacacccttaaagcttccgcttccctctgcagtacagcaaagagttaagcatgataggttagtttctattattcccaccttgtgcagagattcaatgtcccctaccctactcacaggcctaaaatgctccccaggcacagccttctggtcccaggagagagatcccggctgctaaatgcgggtgcaaataaaatcagcaaagggcgccctggatgtgaaggaggtgtgggtgtcagcctgcaatccccacctgcagcaagatcatttttataaaaccctttgtttggccacctggatatctgtgacaaatgatcccaggagccactgccttccctccaccccaccacatgattcaaaaggcaggcactggctgggcaaggtggctcacgcctgtaatcccagcactttgggaggccaaggtgggcagatcatgaggtcaggagttcgagaccagcctgaccaacatggtgaaaatcctgtctctaccaaaaatacaaaaattagctgggcatggtggcgatcacctgaaatcccagccactcaggaggctgaggcaggagaatcgcttgaacctgggaggcggaggttgcagtgagccgagatcgcgccactgcactccagcctaggtgacagagctagactccatcccaaaacaaacaaacaaaaaaggcaggcactggccaggcacagtagctcactcctgtaatcccagcactttgggaggccaaggcgggcagatcacctaaggtcgggagttcgagaccagcctggccaacatggtgaaaccccgtctctactaaaaatacaaaaattagctgggcatggtggcgcatgcctgtagtcccagctacttgggaggctgaggcaggagaattgcttgaacccaggaggtggaggttgcagtgagccgagattgcgccattgcactccagcctgggcgacaagagcaaaacttcatctccaaaaaaaaaaaaaaaaaaaaaaggaggcaggcacacacttgaaacaagccattaagtcccagtagcattttctggaggctcccagctatagcaggaacacaggtctcttctcagttcctgagaagagaactgttttcttgttttgcctttagtcatttacttgaaccactccagaaaactgcccgtcctgctgctgcctgcctctgaccatgtaccagtcacaaataaactgggaaatgcaaacgtgggtgttttatataacttgcagcccctgcatctgcagctgtgtattttgtttaaagctgcaagcccggccgggcacggtggctcatgcctgtaatcccagcactttgggaggccgaggtgggtggatcatgaggtcaggagttcaagaccagcctaaccaacatggtgaaaccccatctctactaaaaatacaaaaattagctgggcgtggtggtgtgcgcctgtaatctcagctacttgggaggctgaggtggaagcattgcttgaacccgggaggcagaggttgtagtgagctgagatcgtgccattgcactccagcctgggcaataagagcgaaactccatctcaaaaaaataaataaataaaaaagctgcaagcccttctgcttttcctttggtggcaaagtttggtcaagggtgttttcaacaataattccacttgtttcaggccccttttggggctcagacccttgctcctgactgtggctgtgaaggggtggaggtctagggccttcattctgggtggctgctgttcttccctgatgctgccccctccaagagaagggatattttaggcgctgattacattgtgagttgttgcaaccaaaggagcatgttctcttgctttcaaaacacaggaaacaaatcactgttttctaagtgaaaaggaacaaaatcagcactgagagaggtcgtgggagctgttttccaagtatctcagaatacttggcaggatgaagcaagaagacctatatttaaaatcttctttatcaaggcctgtttgaagtcagtttattgtttggtaaagaaaagaagacaaaagttttgactctcctttttttttttttttaaattttgagacagagtctcactctcacccaggctggagtgcattggcaccattactgctcatcgcagcctccaactcctgggctcaggcgatcctcctgcctcagcctcctaaatagttgggactacaggtgcacaccaccaggttcagcgaatttttatttttatttgtagagatggggtctcactatgttgcccaggttggtctcaaactcctgagctcaagcattcctcctgcctcagtcccccaaagtgttgggattatagggatgagccaccacacccggctgacatacatatttttaaatgctgtaaaaattcacattgatttaaacgttttaggggtctttgctgttgcaagaaatttgtgtgcctgaggaatccctaaataaggcagcctgttgtgagaactataataatgatgtgagtaaaacccggagccagaacccagaagaaggagaaattaattctgacccttaaatctcggtgtcacacagaggaaatgaaccgggaaggatggtgtgggattgtggagggcagaggttgggagaaaagaccttccagttggaagaggctcaaagtaaagttctggagtgggaacttgggaggaggcacctgctcctgtctgaacagagagccatgtgacggacctggttttcagcccctggctcttggggcagagtaaaactgaaaggctcatatttttcatcattgtttgcatattgtgttttacaagtctgagaagtagtacagacataaatttgctacaaagccaatttggaatttgaagggacatttttatcagtaacaggatgtttgaacaaacttggaatttcatggacttttccacaaccctctttcatgtctgtaaggagcttacctggcaggatgctctggggtaagtgggactgtagaagtcccctgtctcatccaccactgcagctgtgagagggggctggggccatgggtgggaggatttttggaccatgattccaggcggacaccccatctttacaaaattaaatggtaagcatcctcttcatttgctgtaattggctgtctctggtgttagttgagttccatttacccaacagttttccgtctttatctattccctgcagtaaatgcaatggaaggccgggcgcagtggctcatgcctgtaatcccagcattttgggaggccgaggcgggtggatcacgtgaggtcaggagttcgagaccagcctggccaacatggtaaaaccctgtctctactaaaaatacaaaattagccgggcatggtgacacatgcctatagtcccagctacttgggaggctgaggagggagaattgcttgaacccgagaggtggaggttgcagtgagccaagatcgagccactgcactccagcctgggtgtcagagcgagactctgtctcagaaaagcagaacaaaacaaaacaaaaaaaatgcagctgaagtaagctctacacagaggcaccgttggggtgcacgtagaaacccaatcgacatctttccaagagattggtattttaaaaagaaataataagctattctcacaggccaaatgaatgtttgacagcctaatcaattgccctgaagcttttagacagggctgatgaattagcataacttcacagatcaactcttagatgagaattttccccatggagttggcctgtcaccaatgaattgctcaagaaaacccagccctactgaccctggccagctcctgcaggaagaaatatttggtaggcttgagggataagaaagtctttcattccaatgaagttgggcaaaggggcttcgtttggggaccttttggtctttgagactccctgaatattatctcctgtgcctccttcttcgttcccaccactttaagggagactatgcagaatgacagaatgatttggccttttgcagtgggcctccatgggacccagcatgataagaaggccctaaaaacaagactgccctggtggatccctcacctccccctacacaaggctggcactgaagttctctcgaacctaggactgggagcccaaggcttggacgccaaacagcaaagcttcatctaatctcagtcagcttcagggtcaactggacagcgggaatcatttgattttttccatctgggcatactgactaggccatcaggcccacctggctcatgctgttcatgccagtgtcccagtagctgggagcatgtgctcagagccattaagggtgagtgcggcaggccgcactgtggaaggggctggaacagcttttccctatcgtttatcctgaagccttcttacctaggcggtctttcaagggtgcccatggccacctgggcgttgtctccgtcctccttgaggattacaaatcagtgatctctgagtttatctcccagtcaggtcccttcggagagtgaaggaggccttgttaattaccaccttcgttcagtaggcacatatggagactgtcctgggccaaatggaatgtatgtcaccctaattataaaggatggaaaagggaacaaaggtgactcattaatgagaccttgtagtctccaccgagtggaggactgtccccgagcctcatacgttccaagggcaatggacatgcttctgttatgtaatattccagatgctgccacgtccaatgtacggagcactccagttgctggtctgggaatgcgcttaacgtaaggaaagcctcggccccaaccagagaagatcatgctttttctaagtcaaggttataattatgcatttcgacagcctccttcctgtaattgttcagatgttcgtagcaggcgtgcatgcaggcggtgcacctagaagctgctgtcaatcaccatcgcctctttacagcattcctctctgattatgcagggagcacaggctttgactggcaaagtgatcccaagaggcttagcatgggaaagaaatagctagtactttccagaaaccatcccaccaccttcagcgggatgaaggaagccctggctttgctgacttcccaagaagcatcccaaaagcttgcttaacatctcagaaaacaaacctctgcatgcattgatgaaggaagaaaaatacagcctgtacaggccgggtacagtggctcatgtctgtaatcccagcactttgggaggccgagacgggtggattgcctgagctcaggagtttgagaccagcttgggtaacatagtgaaaccctgtctctactaaaaatacaaaaattagccgagtgtgggcatgcgcctctaatctcagctacttgggaggctgagacacgagaactgcttgaatctggggggcagaggttgcagtgagccgagattgcgccactgcactccagcctgggtgacagagtgagactccatcccaaaaaaaaaaaaaaaaaatacagcctggacaatcactgggtcacctgtccttagggattacgggcgaattccagactctgtcctacccaggaaggaatacctttcaggggttggaaggatgtttcaaatcacacctggtcctcattggcgttaaattaaacaaagttagatggaggagcaccatcaaggagccggtatccctgtgaaagagcagacgtggctgttgtcaaggaggtaataagctctctggcaggatgagaagcagtatttattttatccacctacaggatcaaagagtatgtatttgatgaaataatttatgctgagtgaatgtgaaatatcatctctaattgcaggcaattaatattttcactgataaggagagggccccaggctggcttgcctcaaacggcccttacactccagcagttcatacttctattatgtacataatccctggattacataaacccacctgcacttaaacctaccagctccacccacccttgccaaagctgtcactatgagaagaattagaaccttcgcaaatacattctgaaccaatgccacagaaaaggcagcagcttggaatgtcaggaacaacttcgggaatctgacctttgggacattccccaggctgccctgaccctcagtctggatttgccctaagaatactttcccgtattgcactgaaaacattttcagctcatttgttatactgcctgagagcccatcgactggagattagactgacaaacatcgtcttaaaaatgtgaatcatggccaggtgtggtggtgcacgcctgtaaatcccagcactttgggaggctgaggtgagcagatcccttgagctcgggagttcaagaccagcctgagcaacatagtgagacatcctatctttagaaataaaaaataaatttaaaaaaagtgaatcatgaagtgcccattagacatgtacatctaggcatgaagcgttctaaccgccttgttttgccactcacgtaggagctcagctagggatttcctggagcatgtcacaaccacagtgccatcacagagggacgaggacagaggtctagaacgtcgctgtgtgtctgcgtgttctactccccaactagggaatgcatccacaacctgaggctgccccggagtttctgatccttctctccacattcttttttttttttttaatgaagtcttgctctgtcgcccaggctggagtgcggtggcacgatctcggctcactgtaacctctgcctcccaggttcaagcgattctcctgcttcagcctcccaagtagctgggattacaggtgcgtgccaccacgcccagctaatttttgtattttgagtagaggtggggtttcaccctgttgtccaggctggtctcaagctcctgacctcaggtgatccaccggtctcggcctcccaaagtgttaggattacaggcgtgagccactgcgaccggccccttctctccatattctgattgtaagcatcacctttccaacacagaaatgtcagccctgctggggctccgatgtgtgactgagattcagctaattgcatgtccccacaggagacttggactcggaactcacttaggtgagagagaggcagggaacagagcatcgttttgttatcgtgggttgtggcagagggagcttggctctggaggcaggaaccaaggcagcaacatcctgacttggcagctgcctaatccgggtgaggtggcagctccatcggtgagatggttcttcagtgtgatcctgagagttggttgtccctggaagcctgcctagtgcctgtattgctggccctcctgccagttacatgagctctctctatctcttcctaaagcccttctggcttgaattggctaggctggatcctgttgtctgcagctaagaacatcctggctactgccgacaaagcaaagacaacagcgggcagggaaaagagatgtggagaagtggtaggagaggcagaaagagattcgggaagttggcaaatattttgaataatggccactatttattgaggccatatcatgtgcactatcttttttttgagacagagtcttcctctgtcacccaggctggagtgcagtggcactatctcggctcactgtaacctctgcctcccaggttcaagcgattctcctgcctcagcctcccaagtagctgggattacaggcacgtgccaccatgcccggctaatttttgtattttcagtagagacagggtttcaccatgttggccaggatgatctcaatctcctgacctcgtgatccacccacctcggcctcccaaagtgctgggattacaggcgtgagccaccgcacccggcccatgtgcactatctttaaccctcaccactctgttaggcattattcccattttacagatgaggaaacgggctcagaatggttaaggagcctgcccaatgccacacagcctttaacggtgaatcaggagctgggactccaatcctttgtgctcaaagcctaggctctccctagtttgttactttgtccaggccaacgctgcctgcagaaaagagtggaccctcctttccccattctttctgctcctcttgtcttccaactctcagggcccagacattcagctaagcctgaggaacaccacagtttgctcatctgggcttaaaaggctgtgtaaacatgcattagtcagcagcagcccacacactggaaaacattgatatactggggcaaacattcccagaatagatgacaaactaccgagtccaccactcaggggatgggattccaggagctatttgctttctgccttcaacaattgtgctatttgaattttttacacacagtaggtggattgcttctgttatcacatcatatattgcaattagtgacaccaaatcagttgtttaagagagaagggcaggcaagaaaacataaattgtgattatcattggatagtgagattatcattaatttttattttcttcttcatcttcttttttttttttttgagacagcgtctcactctgtcacccaggctcagtgcagtggcacaatcttggctcactgtagcctcaactttccgagctcaagtgatcctcctgcctcagcctcctgagtagctgggactacaggtgtacaccaccacatccagctactttttttattttttgtaaaaacaggatctcactctgttgcccaggctggtcttgaactcttgggtaacataggagcaatcttcctgcctttgcctcccaaagtgttgggattacaggcatgaagcaccatccccaccctattttcttcctttggcatttctgcattagacatatttctaagatgaccgtgtgctctcgttgcttgtagctgccacgaacagataaccctgactcaccctgggttgtgccatgaggacactgataagaacacacaactgcaaggcagaaggagggcctgggcctggccagagcagcaacgccacccaaggccacccaaggcagagatgctctttctgcctctcctctctgcagtccccgtgtctcctccatcacaggttgcatcccctcatgggtaccgcatgtctgcagcagcctgagaatcacacagcatccagacagagaatcacacagcatccagacagagaatcacacagcatccagacagagaatcacacagcatccagacacagaaacaggggctttcttttctggtgtctccttttttgttgttttgtttttttgtttttgttttttttttttgagatggagtctcactctattgccatgctggagtgcagtggcacgatctcggctcactgaaacctccgcctccctgcttcaagcgatccttctgcctcagcctcccgagtagctgggactacaggtgctcgccaccatgcccagctaattttttgtatttttagtagagatggggattcaccatgttggccaggatggtcttgatctcttgacctcatgatccacctgcctcggcctcccaaagtgctgggattacaggcatgagccactgtgcccagctggtgtctcctttttaagactgtgggaacccttccagaaccccctgaagtgggtcccaggcccactctttttttttttttttgagacagagcatcactgtgttgcccaggctggagtgcggtggcgagatcttggctcgctgcaacctccgccttctgggttcaagcgattctcccacctcagcctcctacgtagctgggaccacaggcacacatcaccaaatctggctattttctttgttttttttttgtagagacagaggtctcaccatgttgcccaggtctcgaactcctgggctcaagcgatctgcccaccttggcctcccaaagtgttgggattacaggcgagagccaccacacccagccacccaggcccactcttaagtcagtccctggcaggggggatgtgttagaatcaggtccacctgctggccaggcaggggccagcttccccggcttgtggagtggggtggacacctggacaaagttggggccttgggaaggaagatgtagcgaaacggatgccatgtagacggtctgtgtgtcctctatggcagattattttataattttaaaattttcattgatataaaaacatttaaaaaattatgcttgctgtgtttcgaagccctgttgaggactttggcaggagccacgtcgatgggttcctctatgaaagcttctgctccttgtggacgataatctcagcctgcacacaaataaaaaccatgtcttggccaggggtggtggctcacacctattatcctaacactttgggaggccaaggcaggtggatcacttgagcccaggagttcgagaccagccttggcaacatggcaagacactgtctctacaaaaaatatgaaaagtagccaggcgtggtggcgtgcgcctatagtctcagctacttggggggctgaggggggaggatcatttgcgcccaggaggtcgcgtctgcagtgagctgtgatcatgccactgcattccagccagggtgacaaagcaagattccgtctcaaaacaaaaacaaaaaccggaaaccacgtcttgtttctgcttcaggatattgttctctgggaacgtcaggaaccaaacaggtcccacaagccccacacttccttagctgtgtatcactgggtcacgggaggtaggctgctgaactggggcccctgtcttggctaataacatcccttttttcagctgtggtggttcaaaattacgttttgttctttgctgtgaaaagcgctaagcttttatcagacattatttgatgtagacctaaatatttaaaggcttggccaagataaatgaaatgatcttaaaggtgactcacattccagcattgcaaagttgagggttggagtgagtgaggccattggaggcagctcaggtttactgagtccatatattttctcagtgttcctttcagcaggttggaactggctgcaggagaaatcactgatccctttcagcatgtcgtacagtcgcttaactgtttaaagcaagtgacacagaaattaaggtgggggatctgatgtcttccatcagagaataagctttatcttatattgagatccaaattgccctagcagccttggctgctagaacataagaataagtggatttactattattattattattattattatttttattattattatatattttttgaggtagagtctcgctttgttgctcaggctggagtgcagtggcacaatcttggctcactgcaacctctgcctcccgggttcaagcgattctcctgcctcagcctcccaagcagctgggactacaggcgcccgcccggctaatttttctatttttagtagagactgggttttgccatgttggccaggccggtctcgaactcctgacctcaaatgatctgcccgcctcggcctcccaaagtgctgggattacaggcatgagccaccttgcccggacagaataagtggatttaaagaaagaaaagaaaaagaaaaaaaaactcttcttattattttcaccaatgatgcacaccttttgattcactcagcattctaaaattttagcttagtccttagattctgaagttgcaggtttttttttttttcctttcccctattatgtcatgcacatgacactcaggagctatgctataaatcacagaacaataaacggatagaggaataaatggaacattaagaatcatccaggttatttgtacttgctatttaaagaatgcatgagtcaaaccaattcaactgctataccgggaccatatggaaatattttggagctgaatgtgtccgtggtttgcctgctcagtaggatgtcccaggacacacaggcacctacctctgctaggctttcactcggggccttcctgtgctggaggcccctggccatcccacgtgccttatgtgcttgccaccaataggcttttcaccgtgacaccaggatgtacaaatcttgaaactggtgacctggaaggaagaacaaaaagccaaagaactgtgagttcaacagaaggaatggggccgggcggggtggctcacacctgtaatcccaacactttgggaggcccaggcaggcaaatcaccagaggtcaggagtttgagaccatcctggccaacatggcaaaaccccatctctacaaaaatataaaaattagctgtgtatggtggcgcatgcctgtaatcccagctacttggaaggctgaggcaggagaatcgctggaacccaggaggtaaaggttgcagtgagctgagatcgcaccactgcactccatcctgggtgacagagcgagactccgtctcaaaaaaaagaaggaatgggagtgcgataggaagagctctgtgaacactggagtcagactgttgggtttggattctctgctctgaaagtcacttatcctctctgtatcttggtgtccccatctgcgaaatgggctgtgatgaagatcatcgtgatgcttgtgaagtgcctagcacagggcctgggcctgatacaactggtagaaaatagagggaactgtgttcgttcttcaaggaaactgtaactgaattcaatagggtgctgaatttaggcatcacatggggaggcaggaaccatgaactggctcctaagttctgaatgatcggtaggggttaaacacgcagaactctttgtgcctcggtctccctgatatggaataataaactcaggttgccagaatcatagcggttccttgcatgctcctggaattgctaagaggctggttcccagagaagccctctgtgtgcccgagtgtgccatgtgagccaggtcaagctcttctccaggtgcacgggaaccttggaacaaggccagccctgccaaggacagcaacatcctttgttctctggctttctcaaagcccagagtctacaacgtgatgagcaagccagccttgcccttcccttggcattatttgctttgtgggcaatggtgatgggtgggtcaggcaggagtgggcaccctcggggtccaggaggctgactctgtggggtgcaggcacctttttcactgctctgggcttgacgaggctgataccactgccgggagagtgagcaggggcgcctcccttccctccaacagggatttcttttttttctctctctcttttttttaatttttatttattttttttctttttctctttatttcttcttttaaaaaaaagggatacatgtgcagaatgtgcaggtttgttatataggggtacacgtgccatagtggtttgctgcacctactgacacgtcctcttaagttccctcccctcacccctcacccccaaccaacagaccccagtgtgtgatggtcccctctctgtgtccatgtgttctcattgttcaactcccacttatgagtgagaacatgcggtgtatggttttctgttcctgggttagttttctgaggatgatggcttccagcttcatccatgtccctgcaaaggacatgaactcattcctttttatggtttcaaggggtctgttttcttttcttttctttttttgagatggagtctcgccctgtcacccaggctggagtgcagtggcgcgatctcagctcactgcaacctcggccccttgggttcaagcaattctcctgcctcagcttcccaagtagccaggattataagcacccaccaccacgcctggctaatttttgtatttttagtagaaatggggtttcaccatgttggccaggctggtctcgaacttccgaccacaggtaatccacctgcctcagcctcccaaagtgctgggattacaggcgtaagccaccacgcctggccaaggggttttttttctaaccagctgtagagggttgaatgtgggtccccaaaagatgtgtccaagtcctaacccctggtacctgtgaaggcgatttcatttgtaaaacagtgtctttgcagatgtcagtaagttaaggaacttgagatgagatcatcgtggatttagggtctacgatgatctcattttggtggctttataagagaaaggagagagatttgagacacacaagggagaaggtggaagtggagactagcgagaggtggccgcaagccaaggaacacccagggcaaccagcagccggaagaagccagaacagaccttcccagagctgcaggagggagcacagctctgccgacactttgatttcacctccagagcttacggcctccagaacagtgagagaatgagtttctgttgccctcagccaccagttcgtggtaatttcttggaacagtgcgtcaaccatgggtgcttcctgagccttgtgtggtgaaaagttcagagccgtaccttgtatacccgggggtatggaggaaggtcacacaggctcttggttttgcgtcagcgtggttgttccttcctggggcacaccagttctccccgctaatgtctagtaggcagctgggggtcacctcttagcaccagcacggcgcctgaccagaggccacaggggtgggcgggggtgcagagctggcagatgcagtgccttttaggacaagttatgcattcacacttgagcattttattttattttattttattttattttattttattttattttattttattttattttattttattatgttttttttttttttctgagacatagtctcgttctgtcgcccagtctggagtgcagtggcactgtcttggctcactgcaacctctgcttctcgggttcaagtgattctcctgcctcagcctcctgagtagctgggattacaggcacatgccaccaggcctggctaatttttgtatttttagtagagatggggtttcattggccaggctggtcttgaactcatgacctcaggtgatccacctgcctcggcctcccaaagtgctgggattacagatgtgattcaccgcgcctggccacgcttgggcattttaaagtagagtgagctttctgaacgtgaaggggtgatagagactgttgtgcccaactaagccagatgaccatctccccatgcacccctagccccttggagtccatttagcttatgtagctcataattatagacaatggtttgccaagaaattcctttgtatttttttcagcctgtctgtgccaagagccgtacaaatgagcattggtcttttaatcatattttcatgttggtcttttgaacaattttcatattgtttttctgttgggggaaatttaagatggggaaggatttatctaaatatagacgatgttgctggcaaccaactagagcggtaggcgggacgataataataatctatgtgtacagaacattccggaggcaaagctgtaggatgcctggcggtgggaagcatttacatagagtctaaccatttacaaaatgttttcatcaacattttcttatccaagcttaacaacccagtgagattttctgacaccaaattccatcagcatccaattagtatttttgtttttttttcctttggaggaggaaaaccctaaaagctgctttaggctactgaggtggctcaatcagacccacaggtcctgccaacgtggggaagggtgagagatggaattttcactgcagtgtgaagtgagcacatgtgtgattctcagctggaggtcacactgtgtatatagaaccttcccgggcagggctgtagggtgcctggttatgggatgcatcccaaataaggtattgaactgaaaccctctgagttcgaatctcctggtgaaacaggagatttgggggtctgaatgatcttctctttcacccacatcaaggaggacgtgggagagctctggcctctgatgacccctgtgtgtcttcagttctgcccgcagagctgaaggtggaggagggttttcttttccatggttagccttgagactattgctttaactaaatggattgaggctgcttgactgtttattcttcacccagtcgcgccttgtgatgtggcctctggtctataccctgttagcgcgacattccttcctgggggttaattaaaagcagcaagtcgagcctccctccagctgtttatgacccgcagctgcacagccaggggattcattgctggacttgccaacctaagtcctgatccagcaaaggaaagggagtgccaagcagctgcatcagtcggtgaagtgaggactatattttgtgaaacaaacaagccaaaaagaaatatgattgggtaggctatttttatttctctgagtgggaagctgaaaggcttggtggcgctcctttgtcaccctaaatctcatcagatgcaggctgtgctttctgctacagaaactcaccacctaagccaggccgcttccctggacttgatgtcctcgcctggtgacacgaggtacagtgctgtctaaaggtgccagtgtggggtggaggggtggtgaaagcatcagccccaaggatgcttcagctcagtccatgtggtggggggatgtgttttttatttatttaattaattaatttttatttatttatttatttgagacagcgtttcgctctgtcacccaggctggagtgcagtggcgctgtctcggctcactgcaacctccacctcctgagttcaagtgattctcatgcctcagcctcccgagtatctgggattacaagtgcgctaccacactcagctaatttttttgtattttttagtagtgacggggtttcacttcaccatgttggccaagctgttctcgaactcctggcctcaagtgattcacctgcctcgacctcccaaagtgctgggatgacaggcgtgagccactgagcccagcctatttatttatttttgagacaggttctcgttctgtcacccaggctgaagtacagtagcatgatcacggctcactgcaacctccctctcccggggtcaagtgagcctcccaagcagctgggaatgcaggcacatgccatcatgcccagctaatttttgtatttttgtaaagacagggtcttgccatgttgtccaagctggtcttgaattcctgggctcaagggatccgcccgcctcgacttcccaaagtgctgggtttacagactgcctagcctgagatgtgtgaaatgcactcagaataaaggcctcatcaaaagttcatttagttcaacccaacagatatttaatagggttctagaaaatgccaggtgctattaaaataggagaaaattagtgacgatggtacccaagcaacttacagttcaacagaagacacagatcccattcttctacggacagtctagttttagccaacatgccttatgatggaattgtgaagtgcatgggccaatggaaagaggcatcagaaaagccttcagggaggagctacattgggccgttgtggaaccgaataggctgtgtttcaactgctaggtgtctgtcctatagagcaggctggcaccttgtaggaaaatctgcttttttgtagtggatctctctttttttgagatggagtttcgcttttgttgcccaggctggagtgcaatggcgcggtcttggctcactgcaacctctgcctcccaggttcaagcgattccccagcctcagcctcccaagtagctgggatgacaggcacccaccaccatgcccaactaatttttgtatttttagtagagatgcagttttaccatgttggccaggctggtctcaaactcctgatctcagatgatccacccgcctcgacctcccaaagtgctgggattacaggcgtgagccaccacacccagctgtagtgggtctttctataccccagtgctcactgtgttcagagtaaattaaggtgctcaataaatgtttgttgaatccacaaaggaatgagtaaataaatgaatagagtggagatgaatataaaatcattctggacaaatgaagttggggacgagatttacagatgatcttgaatggtaggctttgaagtttaaatttaattctgtagtcaatgtactttttgcacaagggagtgagtctgtatttttgggagagaattctgctagtagtaggaagggtgtcctgaaggaaggaagactcttaggtagataaaccaactagtcatagggagtttgcctctccagattgaaatgaaatattttggaaatattgaaggttggatgataacttttgcagatccagcttcttggcccgaagttttcccaggtcgggaatgatgcactgtgttagctcaaggccactggattattgccagggctcaattaggaaatcgtgcctgtagggtaacctacattttctgtacttttccaggctggaaactttgccagatggcccatgtcaggagtatcagtcatgccttgcaaggctgtctttaactcttttaccaccaaatgccaaagtggtctcttcctttattaggcctttattctgcatggaatttttttttttttttttttgagccggagtctggctctgtcacccaggctagagtgcagtggcacgatctcactgcaccctccaactcctgggttcaagcgattgtcctgcctcagcctcccaagtagctgcgattacaggcatgcaccaccacacccagctaatttttacatttttagtggagacggggtttcaccatgttttggccaggctggtctcaaactcctgacctcaggtgatccacccgcctctgcctcccaaagtgctgggatgacaggcgtgagccactgcgcctgggcaagtctgcgtgcattaaacacaaccccccagcatgggctctgacatgtctctgtaactgactgaagtgaagcacaaatgccagggcgtataaggccaccagaaaatacgaagtaagtgcccctgggtctcttggcacagcctagataattagctggccctgactctcagcattgtttaaaggcattattgagcattatctcttgtttcttttgctatggtagtgaaggggttgggctctggaggctgaaattttagtttaagattgtcacttgccttccactgtctttcttggagtgacactcccctaaactataccccaatcctccttttttttttttcttttttctttttttttgagacagagtctcactctctcgcccaggctggagtgcagtggtgcaatcatgactcactgcagcctcaaactcctgagcccaagtgattctcccacttgaggatcagcctcccgagtagctgggaccacaggtgagtgccactacccccagctaatttttatttttactttttgtagagacaaggtctcactatgttctccaggctgttctggaactcctgggctcaagtgatcctcctgcctcaccctcccaaagtgttgagattacaggcatgagccactgcacctggctgcggtcctcttatgccacaggttcccatgctgcttttgttatggtagagaagaggttgagctctggaggccgaaatttcagtgactcctgatattttgctaagagcaatggagaagatatggcctgaggacccagcaacggcccccctacctcaggttaatcctgccgggggcgggaatgtgtcctgccacgatgcttctgcccacctgtcggtgcctatgcaggtgtgaccaggctgctgacactgcgtcctgaggtcagctcgaggcggccaagtggaacggcagcttcagactcaggctcctaatgggggcttgtctgagcaactcacagtgtcttgctatggactcttgggaatcctgtgcttcggtcccaagggcacctggtatgtgtagcctttacgcggcacccatcaaggcttccattcaccaaatgagaggcgacaacagacaggtgaggagaactcactaataaagatgctctgtgctgggcacggtggctcacccctgtaatcccagcactttgggaggccgaggcgggtggatcacatgaggtcaggagttcgagaccagcctggccaagatggagaaaccccgtctctactaaaaatacaaaaattagctgggcgtggtggcaagcacctgtagtcccagctactcgggaggctgaggcaggagaatcactagaacccaggaggtggaggttgcagtgaactaagatcatgccactgtactccagcctgggcaacagagtgagactccatctcaaaaaaaaaaaaaaaaaagctctggaagcgaggggcacagtcacggtgtttcagagtgcccactctcgtaattcgactttaaagggatcctgtctgaggaaaacaggaggagtgctgcaagacaagggcagcagccttctctttctctgctgcagcgctgcggtcccaccaacctgccttcactgtttgttacctgatgtcacttaccctgcccggtgttgactccaccctgttcagcctgtggatgactattagcccagagaacagagaaaggaacagtgccacttgaacacaacatgcaacacacacacactttttttttttttttggagacatggtctctctctggcaccgaggctgtagtgcagtgctgcaatcatggctcactgcagcctcaacctcctgggttcaagtgatcctactggctcagcctcccaagtagctggaactatagatgcgagccaccatgaccagctaaattttaaattttttgttgaggccgggtgcggtggctcatgcctgtaatcccagccctttgggaggtggaggtgggtgatcacttgaggtcaggagttctagaccaccctggccaacatggtgaaaccccatctctacttaaaacaaacaaacaaaaaatacaaaaattaggcaggtgtggtggcgcatgcctgtaatcccagctacttgagaagctgggcaggagaatcgcttgaacccaggaggcggatgttgcagtaagccgagattgtgccactgcacgctagcctgggtgaccgagcaaaactctgtctcaaaaataaattaaataaataaaataaaatactttttttgttgttgttgagacagggtctcactgtgtttcccaggttggtcttgaactcctgagctcaaataatcctcccacttcagccttgtaaagtgctgggatgacaggcggtagccaccgtgtccagctgcaaacaattcttatgttctgtttttgttttttgtaaaaagattgtgtcctgtcacattggcttgagtatttacactcattgtcctggtttccattctctcctcaacccactgctgcctgtcttctgtccctgaagcctggtgaattcatgtctagcaaggacaccagtggccctcttattaccgaagcccaggagctatcttatttctcgttctgttacccatcttttggctctattgaccccataccacttgacactgttggggagcagggcatcacttctctctcctggttctccttccacctctctgcttatcagcatccttccctggttcttgttcacatcctgactcttaatagttggagttctttagaattctgctcttggttttctttgcatctgagtgataccatactcccaccagtaacttcattcagccttggataagttcctgcctagtcaactgtttctgttctgtgaggctttcctcaactccccagagactggctccatagcactgtccctatttctcatttctagcacttatcacactgtgtatagacttagtttattctgtaattctttctttctctctttgtctttctctctttctttctctctttctttgtcttccttccttcctttctttcgagacagtgttgctctgtctctcaggctatctctcaggctggagtgcagtggcacaatcagggctcactgcaccctcaacctcctgggttcaagtgatcctcctgcctcagcctcccgagtaacaaggactacaggcatgtaccaccatgcctggctaattttttaaaaattgtttgtagagataggggtcttgctatgttgtccaggctggtctggaactcctgggctcaagcaatccttccaacttggcttcccaaagattgcaggcataagctatgtatctggcgcctctctctctctctttccttctttccttccttccttctctttcttttctatttttttgaaacagagtttcgctctgtcacccaggctggagtgcagtggcactatcttggctcactgcaagctccatctcccgggttcatgccattctcctgcctcagcctcctgagtagctgggactataggcaccagccaccacgcccggctaatttttttttttgtatttttagtagagacgggtttcatgtgttagccaggatggtttcgatctcctgaccttgtgacctgcccgcctcggcctcccaaagtgttgagattacaggcgtgagccactgcgcctggccccttctctttctttctttctcttttgctttctttctttttcttttctttcttttctctttccttccttcctctttcctttctttctttctctctttttctctctctcttcctttctttctctcatcctcaccctgccctgccctccctctccccttccctcccttccttcctttctctttcttttttctttctttctctttccttcctccttctttcttttgaaatttttcaaacacacattaccactacattttaatagtttgattgtatccttgatgagagagattgttagtcgccaccaatattatacatcctttgcttctttcttagcaacagaactcaccgtttgtagctgggtgtgtggtcacttggcacaggctacatttcccagccttctttgctcttgggtgtgcccatgtgattaagttctggccaatgggaagtatgtatgtttgcttatgggtgtgcacgcatgtgtgtgcacgtgtttgtacatgcatatcatttccaaggaagcgtcgttcggggagcaggtttgctcttcttcaccctttcctccgacttgctggctggagggggaagacacactgtggtaatggcaaagtagcaacacagaaggggcccgtgttaggccattctcgaattgctataaagaaatacttgagactgggtaatttataaagaaaaaaagtttaattggcattcttaagagaaagcaataatttctttttctttctttttttttttttttgagacagagtttcgctcttgttgcccaggctggagtgcaatggtgcggtctcggctcaccgcaacctctgcctcccaggttcaagcaattctcctgcctcagcctccagagtagctgggattataggcatgtgccaccatgcctggttaattttgtatttttagtagagacggggtttctccatattggtcaggttggtcttaaactcccaacctcaggggatccacctgccttggcctcccaaagtgctgggattacaagcgtgagccaccacgctcagccacaagaaagcagtaatttcttagtatcattatatgttcaaatagtgcttaagaggttccacaggctgttcaggaagcatggcgctggcatctgcttagcttctggtgaagcctcagggagcttttagtcttggtggaaggagagaagggggaacaggcaggtcacatggtgaaagcaggcagaagctccagagagtagggggaggtgccacccatttttaagtgagaagatctcatgtgaacttagagagagctcacttatggccaaggggatggcccaagccattcatgagggatctgatgacccaaacgcctcccaccaggccagacctccaacactgtggattacaattcaacatgagatttgagttcagactatctcagggcctacattcctgatcatgaggaataagaccacctgcatccacacagcttagccatcaggactgagacctaagatctctgtgtcaacatgacttactatttgatccaggagattcttgttcaggaatattagactgtaaaccaatacgtgctttcactgtttgcctcaacaaattcctgaaaaagcatttattgtaacaaaagattgcttatctttacatataacccccttctctggataacagtataaccacccaaggggttcaccttccctgctgcctagagagagctgattcatcaggacaggaggattgcaatagagtcattcacacagagctggctgtgcaggagattggagttttattattactcaaatcagtctccctgaacattcagggagcagagtttttaaagacaacttggtgggtcgggggaggccagtgagccaggagtgctgattggtcagggaggaaatcatagggagtcggagctgtcttcttgtgctgagtcagttcctgggcgggggccacaagatcagatgagcctgtttgttgatctgggtggtgccagctgagccatcaaggggaggatctgcaaaatgtctcaagcactgatcttaggagcagtttagggagggtcagaatcttgtagcctccagctgcatgactcctaaaccataatttctaatttgtggctaatgttagtcctacaaaggcaatctagtccccaggcaagtaggaggttggtgggcagggtgctgtggttcactcctgtaataccaccactctgggaggctgaggcaggcagatcacaaggtcaggagtttgagaccggcctgaccaacatggtgaaagcccgtctctactaaaaataaaaaaattagctgggcactcgcctgtaatcccagctactcgggaggctgaggcaggagggcaggagaatcacttgaacccaggaggtggaggttgcagtgagccaagatcgtgccactgcactccagcctgggcaacagagtaagactccatctcaaaacaaacaaacaaacaaaaaaacaaaaaaaacctaaggaaaaaaatagcaaaaagtagccaggcgtggtggcacatgcctgtagtcacagctactcagaaggctgaggtgggaggttcacttgaggccaggtgatgatgctgcagacggctatgattatgccactgccctcaagcctggggaacagagtgagactgtttcaagaaaaaaaaaatggaaataaagttttttgtgattggttgatgtctcaagtctgttttttcttcaaaatgtttaactgaagtataatatacatataaaagcttgcaaatcataaatgaatgtatggctcaacaaatttcccaatctcttttaatctatagattgaccattcccctctttttttcctttggaatttgataaagaatatatttgtcttgtaccgtttcccacagtctgtactttgccaattgtttttcatggtgtcatttagcatgttcctctattctgtatttcctgtaaactggtggttgcatctagaagttcagcaggtcaggtgaatttttttttttttttttttttttgacacggagtcttgctggagtccagcccaggctggagtgcagggcaggtggcgtgatcttgcctcactgcaacctctgcccaggttcaagtgattctcctgcctcagcctcccaagtagctgggattacaggcatctggcaccacacccggctactttttgtatttttagtggagacgaggtctcaccgtgttgaccaggatggtctcaaactcctgacctcaggtgatccacccacctaggtctcccagactgttgggattacaggcgtgagccaccgcaacggcgttaaagcgtcttttgaaggtggatgtgatttttttttttttttttgggacggagtctcgctctgtcgaccaggctggggtgcagtggcgcgatctcggctcactgcaagctctgcctccagggttcacgccattctcctgcctcagactcccaagtagctgggactacaggcgcccgccaccacgcccggctaatctgttgtatttttagtagagacagggatttcaccgtgttagccaggatggtctcgatctcctgacctcgtgatccgcccacctcggcctcccaaagtgctgagattacaggcgtgagccaccgcgcccggccggtggatgtgatttctacaaacaagcaaaagccagtcagactgaatgtagtgaataatgtaggtgacccagctggaagatgatggtttgacgtggaacacaaggggtgatgaggccatgaatgatttgcttgtgtgtctggtaaactggctttgatggaaattcctaaacaggtccaaaaacgttctgtccaatggcagcatgaaatgtacagccactcagggtgactaatgtgaacggaacaacagtgactttgacagtgaaattgcatgttggttataaaaccagctttgctgtgtgggtgggcatgcgaggtgcccctttctagtcatgagctcctcttaaggaccccaaaatgtctcagtggtaccggattgaaaattggggctggacggtgctctcctgctgaaattcgggagctacttagcagccccaccttggcaccctcgtttccgaggggcaggccctgggcgcgcgtctcagtttcaagcccgcggcccgacactagagccgtctggatgtgttgacaaggatgccgctgggctccacccgggctcacccgggccctcccgagccctgggccgcgcagcaccggcgtccgcctcctccccattactcggcgagaatgcggtcggggcactggcgcgagcagcctggtgctcctgaacagtcaacaagaaatgaggaagcacgggggcagccgccagggcgaccagaggcaggcctcagagcagcagccatacgggagggccccggtggttttgacctcccgcaaacttcccttttcccgctcagccgaacccctcccctgcacgccggcagccccttggggcttcactccgcctccgcccgctactcgcgaagcccagcccggccccgcccccaacaagtgacgcaaaactgggaggggccacgaggacctcgggcacatccagcagtgcgacggggccggcgccttctccgagctcctcccacgctcgcgggtcggagctcgcgcctgcgcagttcgggccccgggtgtcctcccccctcccctttcttagcaaccatcgcccgctcccgcccccgctccctcggccgcggccgcgcacgcgcgcccctcccggcgcccggccccgcccaccccgtcacccgtaacaaccacaagtgccgtcgccgcgccccttccccctcccgcctccccggccccctccccggaaccggcggtcgagctacggtcgcggagcagtggaaccgagactgccccgcggagccgccggtatgagcgcccctcgccaccccgtgtcccaggcccggcctttctgacaagaggtaggcgcgtcgtcgcggcgggtccgagtgcgccctcgccccggtcccggtctccgtggagtccggcgcctctcgggcgggccccccggaactcccggccgcccgcttgctgagcctgtccctccccagccccggctgccatcggcccggcacccgaaacgggccgtgcccccgcccccctgctcgccctccgcccccctgctcgcccctcgccgcccctcgcccccctcccccgcccccacccccacctcgccaggcttccagttcccgggagccgctttttgctgagagcggagtttcgggtccggagccagtgcccgcccctctctcccgtcggtcggggctttggccccgtggggctcagccgcgcgggacccctgctgagcagccccgggcgccggccgcccctcgagcctgctcgggatgcgttcagtgggtctggcctttggctcctgtttaaacagcgattgtcatgcaatggaggccgtccggctcctggatgccacttggtcgttgtcactccggatgcccgcgtagggcgtttatctggaccagagcatcggcagctgagacctggctgtggttcacaagctcgtgaattagcaggttcttaagtgagtgtagccagttctgccaggcggtggaatcctgaatggatgttaccgtttcttaaacgagcattacgcttttttgcttcttcccccaactcttgtttgtacccggttatcgtcctcatatctgggagagtaccctaaaattaatattcccaattaaatttttaaaagatgattggattcccactgtgcaccaacactgtaaggtttgcaaaagaaaaagaacgtggtcccagcacatcaggatgtgtcagtcgcataatcaagatgaatattagaaaagcttcaagttgagtttggagaacttgggagtttggctctcattctcatggttttagaggtggaagtctttcaagatcatctccccgaaaacctcattttacagagatgaaactgagtcctagggaagtcaaatggcttactcgtggtcacccagagtcattccttagccgttttcacactgtcagatggcgatgttttccaccatgacctctcctctgagaggtatgccagacataccagagaaagttccaaacctgtttaaaccttagtactatagatgggaattctataccaggcgccgtgactcatgactataatcctagcactttgggaggctgaagtgggcagatcccttgagcccaggagtttgagaccagcctgggcaacatggggaaaccttctacaaaaaatatatatggtggtgcgtgcctgtggtcccagctacttgggaggctgaggcaggaggatcacttgagcttagaaggtggaggctgcagtgagtggagattgtgccactgtgttccaccttgggcaacagagagacaccctgtctcaaaaaaaaaaaaaaaaaaaaaggaatcttggaagtttctgaaataaaatacatcttggtaatttgtctctctcttttttttttaacagctagacttcgggctccttgaggatattcagttttgtatgtttgaatatcctctcaccatgttcagcataaagtaccattcttaatgattatcctcaacaagacaggtaggctcattcgatttttctttctcactttaaataggggagacagaggactggcaagtccaggtgtgtttttagagcaatccgtgtaggctggcgctagagaatgattatgcacccataaggagggctccttgactgtgaattaggtgtgaacatttaaccgattacttacggatattagctatctgaggctagagatttcagtggagcctgtttagccagaatacttggcatctctgccactcgaagacaggtcgccaaagctgtagtgtacacagttagaaaataggaattgacacgtttcctttgaagctagcttttgaggagtattccatagtttgagatacagtagtatttttttccagttttatttttgttttcccagagctaatatcttaacacgagatcatttttatttggcttctagtagaagttgtttaagagaaaatgatccaagcattaattatattggttattagaataatagaatcataacagttcattgctggaaaggactcaggtcaggtcatgtaatgaatgcagagtcccagtaagccaatgagaggattggacccctctcacaccagtactgtttgcctcattgcattggggctttgtctgctttttcttattgtttaattacctccccctgccctcatgtatttaaatatcatcttttcatttttgtgtgcatagaattatgacctattgtggtctctttctgtcgttagagtgtggtatgatgtgtcagtgcagacttactaataatttgtttctgcattgtggttacttatcacatatatttatgttttgcaggtgtgagagggttgctgttgtattgcaatcatggtgcagaaataccagtccccagtgagggtgtacaaatacccctttgaattaattatggctgtaagtacttgacatttcaatttactctttggcttcttatttataaagtacagtgttagaatttgatgatctatagatttattgttcgtctccatggcatcacttgaacttactctgtttttatgcttatgaaccgtatctagagtgtgtaaaatgtttttaaaatacaagcctctgaaaataaaaatctgcttattaaaaaaaatgcacctcagggtaatgtatgaattgaagttaattctccctttgaacacacagaagtgggattctaagcacttcttcctcggggttgtgctctttttttccttcgttagagtagcaaagggacatggagtgtggtctttgctgctcgtgtggaagagtgctctgcctatgggtgaattcactttaggtggtgttagaactgagcactgtgcgatggagttttactcacgattcaaatgactctgttgaatgagtttttccgttatttacctgaagaatttggctgaaaataagcattttactagatgcaaagcaaaccttttccagtcatttttagattaccgtagggtatttcttcttttcctttctcttttgtgttattattaagatataacatacataccagaaaatataatacagacaggagaatgtgtctttcatgagcacacacctgatgaaaacgtgtgtcacactcagcacacctgggatactggcaccaaggtcaggaaccagaacatggcaacccaggaagaagtctcccctggttcaagtgagccactgttttgactcctaatacacagaggactgttacctgtttctgttccttctataaatagaaacgcaggtgttttagcagctggctgcttctgctcagcgtatgtttgtgggatttatatagatcaatagttttgaaaaacaagaagtcctcttacgggaagaatttacatgacagggtttgttttaaaatttattttatttatttttttgagacagcgtctcactctgtcactcaggctggattgtagtggcgcgatctcagctcactgcaacctccatctcctgggttcaagcgattcttctgcctcagcctcccaaatagctgggattacagacctgcactaccatgcccgctaatttttgtatttttagtagagatggggtttctctatgttggccaggctggtctcgaactcctgacctcaggtgatccacccgccttggtctcccagagtgctgggattacaggcgtgagccacctctcctggtctatttttatttttattttttgagacggagttttgctctcgtccaggctggagtgcagtgacgcgatcttggcttactgcagcctctgcctcctgagttcaagcgattctgcatcagcctcccgaatagctgcgattacaggtgcctgcccccgcacctggctaatttgtgtgtgtgtgtgtgtatgtatgtgtgtgtgtgtgtgtgtgtgtgtgtgtgtgtgtgtatatatacacatatatatttgttttgttttgttttttagtagagatggggtttctccatgttggccaggctggtcttgaacttctgccctcaggtgatcctcctgccttggccttccaaagtgctgggattacaggtgtgagccactgtacttgagatataatttacatacagtgaaatggtcacgtgtcaggtgtacagtttgattagttttaacaaaagaatccctcacacctttgtgaaaacacaggacatttgaatccatccccctggtgaaggttctgtggtgcgccttccctttcaggtgtgaggttttggtttgtgtgtgtgggtaagaagctctgtgtgttaagatgtctgtgtgttaagaagttacgtgtgttaagatgtagttacacatcttaaatatgtgtagctagggctgttaacagtattttatgttgttgacttaccatgtttgccatttgcatgttatctgtgctgttttggcttttggttgtatgaggcaaagacccactccagccagcttgggaaggagtttggtgagtgggaacatgtatagtgtgataggaatcacacaggaatccgggaattcgagctgggatgggctgagctccagagcctggtagtggagggaggttcctggctgctctgggggcctcagccacagtttttctctaggattttgccctgtgggactgtgcctggctccatgtgctggagccttctaccccgccaccagctggctgctttgctcactcctagttttccatgtggcttcagctcgaggacgtgcttagctgtctgaaagccctctggccccagttcaactctgtggcatttcttgttgcattctttcagtttctaagtgaccaattcctgtcacatttcatagttcacatccttgagagaaacttgatctagttcattccccaccccgacccctgccctggtcctgggtttgaggatattggctagcctgtggattgtttgccttaggtgggaggcctgacccttgttcagtgagctgggctggtggagctggggaggaggcagtgggggtggtaggcagtgggcatcgccaggtaaagtagagtggctgcccacggcccggggtggacacagggcagagagttgggcagggtgggggatgttctccaaaacacttgagtgtggcttaaaaagttcatgcaaccctgatagtttgaggcaaaggctggtttctttgccaaacgttagatttaataaaagaggaggtgtttggattgtttaacgttcagacttccttatttcccttacttcactattttcaaaattgtgacgtttaccttgccagttcatgcaggactttacagaagaactcgaaattcaaattctgagctgccaccaagtttttacaattaaaccattttaaaactattgttctgaggtagtggttaatttcccttctttttctttctttcttctccttttttttcttttttttatgatttaaaacttactagttagaaacttttttttttgcctcaccagcttcaggaaattttcttttgaattgttagaaaaacaaacaaacaaacacacagacgcacacacacgcacgtatattcttccaccctgtagtataaagaaaacatttttaaatccgaaaatgaaatatgttacctttttccttccaaaagtagactgtgagtgatgtttgtgtggtgtcctttgcccccatttcttactgtagttttatggtataaaatcctcagtatttgcttaattttttttgtcattgaggaaaactaacagtaaaatgagttaacctgaaaatgcccttttcagttcagcattcagagtgaggaaagaggtatatatgcagttaaggtgagaacggaaccgtagcttccgccggcggacttgtgagcacgtcagaaagcgaatgtgcctcactagaacgcacggtggcggcaggagtggccggcagtgcccggcacgcagtcacgggaggtgggtcgagtcctggtttatgtgagtcctgtgaggtgagagagtgggagaaaacgcctcactcaacttaatgcctttgtttgtttgttttaaccaagagtttacttgtaatttagtattgccggaaaattgttcaggtaaaaagtgcctagtataaataggtacacagtcaggtcagatatgttaattgcatctcacttgatttaatgaaaatttaccatttgttttgaggtcagtaccattaaaaaaaaaacatgttaaagttctcattaactcgcttgagtggtatttacataagcaaaattgaagtggaggtttttcagtaggcatttgcatggtgttgttttgttagatatcagcccagaaacagaatgtcagagctttcagcgagttggagcaatcacctagctcaaccctcccttggagggcggggaatctgagactccgaggtggtgaaacttacacaggtagtgccgagatctgattctcgagtttagtgttcttttctcatactatgcttcttccttctacccagggatgtgtacctgaaacattttatgaaagagaaatcaaaacttcttggccacacacaaacgaaagcctcacacctgacaaggaaggcgcaccagggaaccttctggggggatggttgcagatgtcctgtgttttgacaaaggtgtgggggactcattttttaaattgagttataatttacatacaatgaagtggtcacatgtcaggtgtacagtttgatcagttttaaccaaagggctgctcttcctggcttgcggggaggagaaattaatcagtgaaggacactgattgattgtgccttaaagggtttaagatctcacgggagcatagtgatatgatcccacagattaggaacttagaatgggatgtataattctagggtgcttgagttgaagtgtttctttttgaaatttctaagataaagcacaaactttaaaagttaaacattgtcaagtgcatctccccctccccctgcatgttaatggttccttaataaaggcttcaaagggaaaatgaaggaggcgggaggccacctagtgtaggagggcagggtgggagaggtcaaggtcaggagcccttaaggagagttgtgggagagagggaagaacatgagaggccaccttctgaacccgatttttgtggtgacagccgcaggcgagatagtggcttggactctggtctttcttctgctgaggacagctgtcctcattgtgaccagtgggaacacacgatagaagaggctccattagctcctgtgcatcccaggagttgccaccctgtccagtgccgtttctgtctgggcttatttccattacacagcagatgtggtcacctcattctttgctctctcctttcctcgccctcatcccagtttcactgtgccctaggagtgctggctttctccaggaaccccttcagtgtctctgtcccttcagcagacacaccctttagactgtgccttcaggaaccaaggcacctggttctgtccctgtctgtcccagcactgccatcgttgcagcgtaagcccctccctttgcagggaaagaccaggggtcccttgttcctttgcgcactcacatctttcatcccttaggtcactttgtgctcccctgccacacactttccattgtgtgtgtcctgtgttgaaggctttcctgttatccgtcctcgcacgtctcagctcctgtgcttttttcggcaaggccatttgtggctgtgttctgcctggtccgtttaaccttatttcataattatgcacacttcccagcttgaacttgaacatttgtttctgtcttgttcccgttggcccggacacacagtgctgtttcctgccccctcttttcttttttcttttcagacttctttgcctcagatgtttgccattccccatctgtctctccagatcttacccatcttgtccttccacacgtccccgatgcctctgaagatgccattcatgtttctctcccttccccgggacacattcttaatgttggagttggtgttaggtactttcacttgcaatgggagtttctttattcacaaagcctcttgagtgttgctctcatactattttgtgtgtccttccagggcagtgaccttgacagttatttgtcttgttctcccaagcgcgggtgctaaggacatagtctgtgggcatgcagatgtgtgtgacttgttcacacgaactgtgaggatgaggacttggtgaatggtggaaattcagatccaaactgtatctccagggcatgatggcgcctgtctgtagtgcagttacttgagaacttgggagggtgagttgggaggatttcttgaggttccaggagttcgagaccaacttgggcaacatagcaagatcctgtctctataaaaaaataaaattaaaataaatggtcatggtggtgtgtgcctatagtcctagcttctcaggaggctgaagagagaggatcctttgagcccaggagttcaaggctgcagtgagctatgatcacaccactgtactccagcctgggttacagagcaagaccctgtttcaaaaataaataaggaaataaaatgcatctctaattctgttttcagacaagagatttatgttttctacatggaacagaagtaacatgctatggtctttcagttaaccagtgggtcacctgggagcaaagcccttttgtgataaagttggctgatttgtgttttttttttttttttttaattttcgtaaacgttgcaaaaccttgttggtaaacactctcctggcagtttaagtggtgtgcttttccaggttgaataaccaaaaaacctgcttaccagtgtataggttttgtttttgtttttgtttttaaatactgctccttgcggagcagggctgacccacaggcagtgctctcagagtaaccacagttgtcgattaaatggcccgagtacaaaagaatttgtttcgctctcctgctcctcttgctttattttgttttgtactctggcatttggggttttttccccctttcctctcaggtgtctcatgtcttcccattaagaccggaggaaggaagagaaagagatttgctttgaggccaggtacaaacctgtgcctgccacagaccagctttgtaacctgctaggccagtgactagtgtaagactgctgtgaggaggtgctggagtgaaacagacagcaggggtgagggtaggcaagggcgacctggtgatgccacagtctccccctctcccttccagataccctgccccttctcacctccaaataccaggggaactgaatcagtttataagtgagtaaatgactatgaatgtgcatctctgttagatcaaataggcatttatattgaagctctttcatccattccaatttcatatacaaaacagggagacgtgagggatcccaggatggactcgcgactcatatatcttacttcagggtgaggagacactgctcttccttaatcagggcctccgtggagtgcgaaatgcccgagggagaacactttctgacgggcagctgtgcccatgttgggcagctgtgcccatgtcgttcctctggttggttgggcagggggcacaggtcctgctttgccctttctccatctttgtggcagctagctgcgttcagaaaccatccatccgcccacccgtaccttgcctgaatattctctgagctgcctgtccccttttctctaactttttcttcctctgactgaggtcctgtgcacgtcagattttcagcattgttttagttacaggaaatattttcagtccatcgttcatcttctcagagcatgtcttctttctctcatcctggatttcatccttgggcctttttgtatttctgattctggtttttttagtttctgatggttaggtgtgatattgaaatacatcttttcattcatcaaggtattcttagatcttccagcagcctaatgtgcagtagaatttgtttttacccaaacgaataagcaatctactttttggggtaggtgacttaaaacccaactttgttcaagtctggaagtggagggaaatgttccattttctcctatgacatataaaaggacctggtcaatcagtgggagactgtgctgccctcgtttgtaaagttgtgaatgccatcgcgtgagtcctattgcatttcatcaaagctggggtggtgtaattagtcagatttagttggttttgaaaatggacaattagagtgagctttcatcacgtgctcctttgtacagagccagaccttctcccttgtgttccgtctcagcattatgcattccagttggtttttccccatgcttttcctgagctgtatccaagtgtctttaatgcgctagagtgaaggcagttgtggtgcagtaggaaaatatttcaagcagaaataagatgtatcagattcagcttctcgcctctctgatttacctggtttttataaaaacaaacaaaccccaaaaccttgttttatggaaaatttcaagcatacacaggtagagagaatcatataataaatgccatttacccatcacccagtttcaatgttaccagcatcttgccgggcctgacacagtggcttatgcccgtaatcccagcactttgggaggccaagtggggaggatggcttgaggccaggagtttgagaccagcctgggcaacgtggtaagaccctgtctctaaaaaacaaaacaaactcttgccaatatttttatcagttgtacccacttttttctttcctggtgtattaaagcagatttcaggtatcttgttaatttgttgacaaatacttcagtgtacatctctaaccttttgcttatattatttttatttttttgagatagggttttgctttgtcacctaggctggagtgtagtggcacgattatagctcactgcagcctcgaactcctgggctcaaggagccctgcctcagcctgctgagtagctgggactacaggctcacaccaccatgccagctaatttttctttttttaaatttgaaattatattcctgttgcttaagattactaaggcagacttttttttaaaccaaaatattcagtctccatagagactgtcagaaatggtcagtgctggctgggcacggtggctcatgcctgtaatcccagccctttgggaggctgaggcgggtggatcatttgaggtcaggagtttgagaccagcctagccaacatggtgaaaccttgtttctactaaaaatacaaaaatcagccgggcgtggtggcaggcagctgtaatcccagctacttaggaggctgaggcaggagaatcgcttgaacccaggaggcagaggttgtagagagccgaggtcatgccactgcactccagcctgggtgacagagcgagactccgtctcaaaaaaaaaaaaaaaaaaatggaaatggccggtgccagctctattgcaagttatcttgtggtattgggaagttttcaatgagcaataatcacgtctcgggtaaacctcactgactatgatggggccactgtgcagagagcctttctcctttttaaacacagccgccatgttgttatcccacctaacaaaagtactagtgatgcctgatgatcatctaatacacagttcacgttcatgttttctcacttgtctaaaaaatgtctttcataagttgcttggatcctgcttcaaataaagccatttgtatttggttattatgtttcttgggtctcctttattctctaacattctccctttccttttgtttcctttcatgccattgatttgttagagaaactgggtcatttgtcctgttcagttaccttaaccttttgctgatttaattgttccttacagcaaataggctgtaaggagaaggtgtggacctaaattcaatcaatgcagccaccctttagcagttctctttatttatttattattattatttttttgaggcagagtttcactcgtcacccaggctggagtgcagtggcgcaatcttggctcactgcaacctccgcctcccgggttccagcgattctcctgcctcagcctctgagtagccgggactacaggcatgcgccaccacgcccggctaatttttgtatttttagtacagatggggtttcaccacgttggccaggctggtctcaaactcctgacctcaagtgatccaccctccttggcctcccaaagtgctgggattacaggcgtgaaccactgagcctggctagcagttctgtttaaacatttgctggcagagatggaaactaatagttaaaaccagctgctccccttttcttcctaggattgttctatataattttgagttgcaaataagatgcaaaatatttttttcccaaattaaactaggccattctatttatggttactccttatttatttatttttgtagttactttttaacactgaatgggtcctcattttgtactgaaagcaggtgagagggattaatttattggcagcgtttctatgtagtgcatgcagcaggcacttggcaggagtctggcctggggctgaggaggtgggtggtgtttgtggtctgaggtgtccagttgtgctgggcagtcagtccttgccctcttctgttgtctcttttattagagctctggatagggctgttgggctgcctggggaagcttccccagagaagttcactgtagagaggattttggttggcagatgttataattgatccatctctcttgatttttgacctgtacgctagtgaagcagacacttttatatagttctagtggaattattttgcatgttgtaacaagaagcatatattgcgttgtaattttcttgcatggtacaagttgatgtaagaggacagcagccctctgtatccttgtgttctgcacccacagatacaaccaaccgtggatcagaaatgttcaggaaaaacaacaaaaataatacaacaataaactgtaatacaaataaaacgcatgcaacaactatttacatagcatttacattgtatttggtattataagtaatgtagagagaatttaaagtgtacgggagggctgggtgtggtggctcacatctgtaatcccagtgctttgggaggccaaggcgggagaatcacttgaggccagtagtttgagactagcctgggcaacttagcgagactctgtctctatgataaactgaaaaaaaattagctgggtgtggtggcgcatgcccgtagtctcagctactcaggagacttgagacaggattgtttgagcctaggagtttgaggctgcagtgccactctggcctgtgtgaacagagcgaggccctgtatctaaaagatgtgtgtctgtgtatatgagaggatgtgtgtaggttaaatataaaatgtaaatgccactccatttttatatcagggactggggcatccacaggttttgggattggagggacatcctggaaccagtcccctccagataccgagggaggactctactggccccttctggttttttttgtttttttttggtttttttttaagaaaagtctgtctctataattatgtatcaatatatgaaataattgctatgtgtatctttatatgtactggatccattttccattcagacatctgccctgtttttcagtgatctgtactgccatgtgtatcagtagaatatccgaggtactgataagcgtccagtttgtaaatgtcttgtgtatttcagtagatggctgcgtccttacttcttttccttttaggggtccggccttccccttctgatctggactttctttattccactttcttgccttattaaggtgcggatggattgtttgttccttttcctctgattttgctgtttggggacccccagttgtatattttgcattttctggcaataataggtgttttaatgagcagttaatgctattttaggcatagctatctggctctcttactgggcagcacttcctgggcagccccatttaaacctgtggcttcacctgtcactttataaactaaagatctcaaagctttgtcttcacccgagatgccccccaggagcttccaaactccaagccaggtgtctggcagacatctccatttcactgtcccaggcagatttaatgcctctgaaacagagttcatctcctcttgcctgcgcaaaaaacacacaccccaacagaaacaaacacacacccacacccacacacccaccccagtaaaaaccaaaccaataaaacaccactcagaagctctccctttcccctgagctgctgctttagatgtgtggccccgcaggtaccttaccctcagagcagaaatccaggcatccctggcagccttccttcctcacccctcagtcttgctggtgcccagatgggagctggcagagatgtctcctggatgggcgctcactttgctcttctgtagccttggtggcttagccccagaccactcctccttacaacagcctctggaccctgagtctacccctcactcttctgctcgtccttggggctgctgccagagagatcggtacattgtaaacttgactgtgctgcctgcaagtttcaaatgatgaagtgcctgcacctcatctttatttatttatttatttaatttttttgagacagaatctcgctctgttgcccaggctagaatgcagtggtgccatctcggctcactgcagcctccgcctctctcctgcctcagcctcagctgggattacaggcgtgagccacttcgcccagtccacgtacctcatctttaagatgaggttcccagcttaagcttggctcccagaatcctttgtcattggccttctgcctgtcctgcagcctcctctccatggcgaggcctccacacccactgcacagtctaattatgtcgaatttcttgctgtttcctaggtataccattttttgtcatgatcttggtgccttgaccacatacttgcctggaatacctttcctgctttctcacctggctgactctagctggctgcatgcagttgctcctggtggaggttcctctctgtgcactggcagccgctgtagggtcctgacactccactggtctctctgcctctctctgtcaccttccctgcaactgccagtgttcccagggtgagaatcaaatcctcatgccctcaaaaatagatttctcggccaggcacggtggctcacacttgtaatcccagcactttgggaagctgaggcaggcggatcacttgaggtcaggagtttgagaccagcctggccaacatagtgaaaccccatctctattaaaaatacaaaaattagctgggcgtggtggcgtacatctgtaatcctagctactggggaggctgaggcacgagaattgcttgaacccaggaggctgaggttgcagtgagctgggatcacaccactgcactccagactgggcagcagagcgagactccgtcttaaaaaaaaaaaaaaaagatgtctatgaagagtagagggtcttgcagtgtatgctttcgtttcttgcatcacttcttctctgtcagtgaaattttgttttttgttttttttttactctaatcccatgacataatgaaaattttgacaaaaggttacattggaacatagtcgtttggtcggctgtatttactatttatggttcaaaagaatctgatgcaaatcatgttttgtgagtaaaatagttcagtgaactgaagcttataatccctctagttgcctgaaaagcgtgtcctggtttatgtgtcacttagtgttttgagtggcttttctcctgtagtgatgaatacaaagtatatacaaaatcctatttctttggttctcctacagaacataaatttattttaagtaaaattcttgactctggtggaatggtaatctgactttaagatttctccaaatttaaaacccaagagttattacataattcttgttttcttaataaataagttattccatagcatgaggtaggcctaatcacaaaatgtgtgtgtttcttttctttttcctagtttaatgcttgtgtatgtattaaaaatcaaggcccagaactaaaagctacagggtacatattttaagaagtaaattgatttaagtggtcattggtatgttgcaggatttatggcattaatatttagaaagctcttctccaaacacgtattatcttcatttgaattttctcacacaaagttggtttataatgtaaattcgaagagttccaaatcctaattcttcactgagtcagaatttctggaggtgagtcccgcagtctgtggcttcacaaggcttccaggtgattcttaacgcctgctcaagctggagaacccctggtgtggatttgcatcatttgaatttgtagtacatgggataggaagaaaggagggtggtttctattataactttttttttttttttgagatggggcctcgctgcgttgcccaggctggagtgcagtggcatgatctcggctcactgcagcctccacctcccaggttcaagcgattcttctgcctcagcctcctgagtagctgggattacaggcatgcgccaccatccccggctaatttttgtatttttagtagagacggggtttcaccatgttggtcaggctggtcccaaactcctgacctcgtgatgcgtctgccttggcctcccaaagtattgggattacaggcatgagccaccatgcctggccataacttttatttaaaagtttttcaaacgaatggtttttttcaacaggctgtataaataggctcttattacatcatgttttcatgtgacggatttaacatacactagaaggagactgtttgctttatgtacttctccaaattgctgttcttgagtttatttagtgatgtccacgttatattaacaagcatgtgggctgggcatgagccaccgtgcctggccataacttctatttttgtatttttagtagagatggggtttcaccatattggccagactggtctcgaactcctgacctcatgatccacccaccttggccttccaaagtgctgggattacaggcgtgagccatcgtgcccggcctgtaaccacttttaagtgcagagttcagtggcactaactaaattcacatcgttgtgcagccaccaccaccatccatctccagaactttctcatctccccaaatcgaagctctgtccccatgaaacactcattccccattcttcctttccccagcccctggcagccaccattctttctgtccctataaatttgactactctcggtacctcttatgggtagaatgacacttgaccttttgcgtaacttggtagttacttgaccttttgtgtaactgggttttttcacttagcctaatgtcttcaaggttcacccatgttgtagctttagtttttgggtagtacttgaccttttgtgtaactgggttttttcacttagcctaatgtcttcaaggttcatccatgttgtagcatgtgcagaattcccttcctcttcaggggtgaattgtactcaattgtatatgccacattctgaattgaattgtactcaattgtatctgccacattctgctcatccattgacttaccgatggacgttgggttgtttctaccttttggctgttgtctgtactatacatttttaaagtttcaattacattttatagctttctttcctttttttttttttttttttttttttttttttttgagacagtctcactctgttgcctaggctggagtgcagtggcacgatctcgactcactgcaacctccacctctggggctcaagcaattctcgtgcctcccaagtagctgggattacaaatgtgcaccaccacgcccggctaatttttgtaattttaataaaaacagggtttcaccatgttggccaggctggtctaggacgcctggcttcgtgtgatccacccaactgtagtattttttttgttttgttgtttctgaaataaactttcactctgtcacccaggctggagtgcaggggcacaattttggctcactgcagcctccacctcctgggtcaagcaattctcctgcctcagcctcccaagtagctgggattacaggtgtgagccaccaccacctggctaatttttgcatttttagtagagatgggggttcgccctcttggccaggctggtctcgaacttctgacctcaggcgatgggcctgtctgggcctcccaaagtgctggggttacaggcatgagccaccacacccggcctcttttcttcttcttcttttttttttttttttgagacagagtctcgctctgttgcccaggctggagtgcagtggtgcgatctcagctcactgcaacctctgtctcccaggttcaagcgattcttctctctcagcctcccaagtagctgggactacaggtgcccaccaccaagcctagctaatttttgtatttttagtagggatggggtttcaccatattggccacactggtctcaaactcctgacctcatgatctgcctgcctcggcctcccaaagtgctgggattacaggtgtgaaccaccgctcccggcccttgtcttttatatttgatagattccagatccaaaagacaagttccttgaggaattcaaccaccactattttattccatctgttgaaaatacagctttaatttacagctcatgattgccattgttgttaattttttaacaaagaaagaatagcatgtaaaagctggtgtggaatgatgagctgagtggtgacccacttaaataaaagggtgaactcctgtgctaagggaatggaggtggtagagaagatagagaattctgtagatgaccctaccccctgttaagtgttcaagtcatagtgttactcctgattttcttttctttgttcttcagagtgtgatttaaattttaagtgcttcaaggtctatgaagtacaacctgcacagtagatatttaataaacagtgagtgatcagtattttcctgatggattaaagcactcctattggcagcctactgactctgtggagttattattctggttcatgaaaccagataatatttccatagctcattgcattcctttatgtgggcaaacacatggcatctttaaaagctgacagctgcagttccctagaacaccaaatgcttttctgaagtccacaaatttctcttttacactctggaaagtaaaaccgtactctgccaagtccaggcggatctgaaggggaatatgcacactgctattttgttgttagagagagatttgtactcagtttgctctttattagaccaaaaatttttcagattaggaatggtttttgaatatcatgcatgttttggtttcctttggatgctttcagcatcatgtgattgctttaaacacatgaaaagcaaagagaaataaaacctttcgtagccctgtagacattcttgtttgcctagggcttaagtgattgtggcatgcaaagtatttgacattcaagatttattgacggagaccaggtatcttaagtataaagatttgtatttaaagatgtgtatacctccatttttttctaactagtgtctttataattctctaacagggattggttgtctttgtacttttattttgataatcgaaaaactacatggatgcgttgagatcatctgtatagcatgcttacagctgagcactatcagcacatggttagcttttattttttgtggacaacaaataatactgttttaatggctgaaagtaaatacaaaaagaatagggatgaaattactatgtaagtgatgtgtttgagcgaactatagactggggtgcttactttgcagatggggagctgtacaaataaagatttaaatagagtaaaacgatgggagtagtgagtcatcagacagcttctgtccagtttgaaagaagctgtgcccctcctgttcagttccatattcattttgaaggggaaattggtcttcaacaaattgtcattttccccatgaaatgtatgttgtttacattttataattgtatgagcttttttgttttagaaactagtttgtttgcacctatttaagtaacgttataataaaaataactggccagtcaaggtggctcacgcctataatcccagtcctttgggaggccaaggcaggcagataactgggggtcaggagtttgaggccagtctggccaacatggtgaaaccctgtctgtactaaaaatacaaaaatcagctgggcatggtggcacccacctgtaatcccagctcctggggcggctgaggcgagagaatcacttgagccgcggggatgggggtgggatggaggttgcagtgagctgagattgtgccactgcactccagcctgggcaataaaatgatactctatctcaaaaaaaaagttaattaaaaaataaaaataactggtcaatagactgagttctgcaagggggaaaaagtaactggtcaacattaaaggttcaaggacacgtttctcttttaaaaggagggtttgtacatgactcaggcttcatgaaggatttctttgccatagagattttgctttactttcatgaatccaaatcagctgggtccttaaattggttcttttttttttttttttttttttttaaacaaccagaggttaaggaagggaggggaataaacatccttgtattttcctgtttgtgtttaacatgagtgcctggttggctcaagtactatattttaatttttgtttgtttcccttccctcccctcccctcccctcccttccttccttcctctctttctctctttctttctcttcttttcttctttcttcttcttctttttttttttttaaacaaacccttgtgttgagggctgactttcaatagatcgcagtgagggaggtgctctgctacatacaaatccccgacccagaattctgcaggtcgtctatgaatggtttagagccaggttccccacgaacatgggtggcccaacgggcaagggggcgactgcctttcccaggacgaggggctttctgcaccggaccccagtcctggcgctcggcgggggagggaccggctctctgaggccattggaggccaaccgaggccccacgggcactgctgtatccgtctgcctgggtgggattctgacttaaaggcgttcagtcataatcccacagatggtagcttcgccccattggctccttattgtggctcaagtatttttaaatatgggcaacccttcagtgcaaggaatcaaattagtactgatttgacagccattttaattgaagttgatattgactggtaaggctgagatgagaatggaaaataggaatgacagtgtcttcaatttcttctgggtgtaatttagatctgtgcaaagtaacatgatgtatattttgactgcattattaccacatggtggaaaggttaaaaaaatgtgttgtggaccaggtgcggtggctcacacctgtaatcccagcactttgggaggccgaggcaggtggatcacctgaggtcgggagttcgagagcagcatgaccaacatggagaaacccgtctctactaaaaatacaaaatgaactggcgtggtggtacgtgcctgtaatcgcagctactcgggaggttgaggcaggagaatcgcttgaaccggggaggtggaggtgtcggtgagccgagatggtaccattgcactccagccagggcaacaagagcgaaactctgtctcaaaaaaaaaaaatgtgttgtggattctcatagtcatgttttctttttcatgaaggacattttggagtgctttgtaggtgatgttaagatcctcacctaaaactatatcatgtttttacctttaaaagcttaaaacacttaaagctatttagtttgagaatattggccacgtaccagggagacaggggagttcggtatgccatcggccaataggacacaattctccagcagcttctgcctcctggactcttgttacttcctggaggggattgacgtagctcctgccgctgtgcttggtctggagcttgcagtggcaactgagccccttgagttctgctctcagcgagtatagagtctgtgaaaatcgatgatacgaattggacttaccctgtcacacccaactaaactggagtcgagggaccaggggagaagaaaagctgggacacagagcgtctgccccgggattatcttgaaggccagctgccaaagtgacctgctgtaactttaagaccagtgttaactccttgctgctgaaatgaattactgtgactctaagactggttcagtcagagcttgccagctcccaaaaacttcactagtaccaatgagttttcaaaacagtatgtcacctttctttcttttctttctttttctcctcctcttccctcctctttggttttatactttagctatgaaggccatttaccagagtcaaacttgttgttaacaagcagaatttttaagttcattcagagagtccctcagacttttctgagcctgttcacttgcagagagcagacgctgtcaccatgttcttcgtgtcatgcattcacatggatattcagtcttcatatgctgtcaagtttctttaagatcaaaggagcggctcgcagcggggccacatagatgatgacttttctctttctcataaaacccccagccttccgttttttcttcgcacataccgaagagcacctggtctttctctatgccccaagttgcaattctcttttcccaaatgaaactgttttagggattcagctttatatttttatttgaccttgacaagcccagggtgaagatgatactgcttggcctggagaggagcctgggctcctgggtggcagccagggatcctgccactgaaccgcaatttgcaaaatacttaaagaacatataacaggtctaagaacaacatttagagagtgcttgtgtggcaatatcttgtttattgcccacacttactttgtgggtaggctctttcatcccactttacaactgaggaaacaggttgaaattggttactaagtgattgccctgacctggctgcctcgcctgctgacagcggtgtgggctgacccggtaccgtgcccccgagcaggcagagcgcctgtgcccacctggaggccatcagcccacggcgctcaggcacttggctttcataattcccaacagggccagtttgcagtctttgctttaaaagacctctctgggagtcactctgaaccaattctggtttgagggaggactgcccaatttggtcaattaaactcaattttttgaaaaacctcccaatttccccccacctcttttcccttttgctctgtctggtgtgatccgtctccctgctgggcagtaaccctttttcccagcgctccccctttgttggtggctttccttctgtttgcttggacaggaggcctttgcttccaggttgtccagctgggattcaaatcaaggtccattgacacaagagcccaggctctaatttgctctgccatatgcctccccggtttgtgtcttagtcctagaatgacagtgctggaggagtggagggaaaggacacttggatagctgagttgcagacatgataattgggtgggtgcgggtgagggtggtggtgatgcggagtgggaggaagttgctaggaaagctgagcttaaaatagctgaaggccatagatactggtacagtgtggagtctggcagataattgtgtggcagagaaggcttttgtcctgagaatagtagatgacctcccagaactgtgggaacaacagtctcatgtttacatttattcaggccacaatggagctgagcaattcgcttcctgacatgaattctttctcttccaagtagatcgtgtttccttattctgtggaaaacgttaatgccattagaagccagattgagggctacctgtaaccggaaacctctgcagagaacatcctgttactcagtacccctttttcttcatttattttatgaaagttccctttccacttgactgatatttatcttcagggccatattttctccttctgtcaaccgaatatagtatacgtagctaatcaatgaattagataactaaatccatatatttcctcttcttctgtgaaccccgaatatctgagacaggtcttagttaatttagaaagtttattttgccaggattgaggacgtgcctgtgacacagcctcaggaggtgctgacaacatgtgctcaaggtggtcagggcacagcttggttttacttattgtagggagacaggagacatcagtcagtatatgtaagatgtacattggtgctgtccagaaaggcgggacaactcgaagcagggagggggtctccaggtcgcaggtgggtgagagaggcagccagaagcatttttctcagtgagtagaggggtgactttgagtggaatgggaggcagatttgcctcccagtttgacttttccttttagctgagtgattttggggccccaagattgattttcctttcacaatttatatgataaggggagtgttttattcccagtgcctgaactgaagtatgatcattttttttgccattatcttcctttggccttttcttttctctgtagaaggcaggagacctaatatgctcctatttatacctagttcctttttttagtcggctaattatttacttaaaataactggttcctagcaaagtctcatgagatttacatcttgtaattttagggtcatgagtgagataattattttagtttggtgaacacatggattttatttggtgcatttccaaagtttagtagaaaagataaatgtcaaatgaaaatgtttagtgttttaaactgtttgcattcagaaggtccccctcctcatcttgtgcatagctcagctggttcctggactgtgggcctgacagcggctttacttcattgccaatagtgtcttcctccttgagaggttcatgtgttgcacagaacagtagccacacttattgagtattgtacttattctttgtttttgagatgagatcttgctatgttgcccaggctgctgtcgaactcctgggctcaagtgatcctcccaccttggcctctcaaattgctgggattacaggcctgagccatcatgcttggccccctacttattctgtgtcagggcctgccaaacattttatgttttcttatttaatctttcaacaatgctgcaagttgaagatgatgaagaaattgaagcttaatgaaattaaatagcctccccaaggaccacttttaatggtggaactgggatttgaagccagatctgcctcttctaaagcctgtgctctgaaatagaatggtaactggagtggggcagacctgggttcatatcctgggttcaaattctctcagcctctgttttctcattttaaaatgggagaaacacttatgtcatggaaagatgagacctattaagggccgggtgcagtggcttatggctgtaatcccagcactttgggaggctgaggcaggtggatcacttgaggtcaggagttcaagaccagccttgccaacatggtaaacacctgtctctactaaaaataaaaaattagccaggctgggtggcgcacacctgtagtcccagctacttcagaggctgaggcaggagaatggcttgaacctgggaggtggaggttgcagtgagtgaagatcgtgccattgcactccagcctgggtgacagagcaagactcagtctcaaaaacaaaaaacaagaaaaaaacaaaaataaataaagattgtacctattaaatgcagtaatctttgggaagctgattagggtgcatgcgtactaggctctccatatatacatgttggtttgatcatccctctgatgtgtttctccccagatgaaagctcttcatgggtaggacccttgtcttgtgttcatgtgtcctcagccctgtgcctgttggagaagggagtgaatgttgaataagtaatgttagaaatttttctaggttcttaaaagaagcttgtttgtctttctgttttcttttctttttcctttttttttttttttttttgagacagtttcccaggccagagggcagtggtgtgattactgcagtctccacctcccaattcattgttgaagcaattctcctgcctcagccacctgagtagctgggattacaagcacgcagtactacacccagctaatttttgtatttttagcagagaaagggttttgccatgttggccaggctggtctcaaactcttggcctcaagtgatccacccaccttggcctctcgaaatgctagaattacagacatgagccactgcgcctggccagttttcttataccatgagcacaataggtttttacctttggccaatgggttacttgattgcttttgtttctttttttcatgtttaatggagtttattttttagagcaattacaggtttatagaaaattgagcagctagtacagagaattaccatataccttctccttccaccttacaaatttccctattattaacatcttgtgtgatactgatgcaggattttttgcttagctcagctaggtctgggttcttgtctcatgaccaggaggaagtagacacacggacactcaaagagtgagcaaggcgggaagttttattgagtgatgaagcagtttttagtggggagggtacacagggttactccctctacccaaaggcaagagagttctttgtgttgggaacaagtaagcggtgctgaagagaaaaaccagtattgagacaaattatttctcagcaaggcaatttacttctgcagaaaggtgctgcctgttacaaccgcaagagtacaccgagcaaaggagggaaggggtttttatccctaatgcagttcctgtccctgtgtccttcccctgttggctagggttggaccatacaatctaaactgatgccagttggctaagacttaaactttttctaataggtaaatgcgtgatttgtaagagaaggagggggtaggagtggtctgtccattacggtacggggcatgtcgggccacaagcgtgggagggttgttcggaggctagaaacaagggagtataaggaggttgggcttctgaacaaagagcaagaacgttacacagttaaaccctttgaagaggaattcatcatctctggcaatttccccctttgtcttttgataattcttcctcttcacatttttttaacatgatttggctctgctgttcttctcgatcacctaggaacaagagcctatttgagtatagaggaggagaggtaggggaggttttgtgagagctgtttctataagtccttgcattaacccatggatacagggtatgatgcagcatcctacatatgagtacacctgtaacaattgcaagagaggttaatattgaagtcataatccctttccattcaccaaaccacttttccatgagacttgtgatggggtcatttattctggaatttttggctaacttatctgatatggaggtaaggccttgtaaagccttcataattgttccattgggagctgtgttgttagggctgaaagtacagcattggactctggtcttgacacagactttgcctttttttgctaacattatgttaagggctcttctattttcccagggcatttggctggtgggcctaattgttcagctatccctttaatggcatcgtctgcataattgacaaaccgctgttgattatagtaaatgtaatttatccagtctacatttttgtttatagttgaccaccagaacagtgcagatttgaatctgaatcctgcagctatttggtttcggggtttaaatttatctggtacctcttgtgggaccccagtagcagctacataaatgtgagggtcaaaagacccgtgaggagcatcttttttttttttttttttttttttttttttgtgatcctctgtcctgttatgttgacggaatgccagagtgaaagggccagttggactagggctcacgtgccgctccagtttctcagcagagtgcctaatagtttaccgcagtaccaccatacatttgcttgagaatagacaaaaggcagcttgactggtaagctcttgggaaggcttggtttgactacaccctgttaggtctccgagggacgttaatctttccccttgccatgagagaagacacgaggtaaaattaaatcagaagctggaggccagatggccctcgggggctgacctgcggggtctttaacttgggggaatagcaatgagagagtcttgcatgctctctcccaggctgtgagattttgaaagagacttaccatgcagcttatgcccggtcagtcagaagaccatccaagtgggaaggggactatctgggcctctggcctgcctgccgcacaagcctaacagtcaattttgtttaatgtgcgagcagaatatttaatccattccagccaggcattcgcatcttggtatcctgttctaagcactaaagtttgttttaaatctttaacctttacagtgcctactatagtttcgtcatggggtatggaaagaacagctgtttgattggaagagggtttagaaggagaagaaggtgaagggggttgaggagtaatgaagtgcatttcaaaggatcctttggggtcctttccaggaatattagctcctgggccatagaagtgacctagggtaggcttggtgtcggtagaggtggggacattaatagagatttgcacagggttacactgttggagttgacaggtggagggggttgtacctttggtaaagtgaatgtaaggctttagataggtacaacctattgaggaggtccagccttgacacttggtggtatagattacatctccctaagtatcacagaactaccagttataggatcggcctcagtccatgcaaaagtcagttctgtaggcagttttatttatcctggaagggcaaaggtacttttctgaagaggccagctgtctttggctttggagatccccacagggcataacaagacaagcattaaaagtaatggtttgaggggagctagatctggttatattaataataagatgtgtggtagctggggaaaggaagctaagaaggaagagacagattaaactttcttttttaacgtgactctggttggggtgggtcctggaacggcagtccatgactctggagaggatggtgctcttttgacttgggtgtgatgagtgcaaccgtttttggtggtcctgactgccgtttcagtttttagaagtactaaataaggttcttcccaagtaggtttgagcttttcttctttccaacttctgacgaggacgtaatctctgggctggtgatgatggcctgcaaattcaaggggtgcagtttgtgctaaaaggccttgagtcctaagagaggaaagggtggaagacagacctgatacatagtttttgagaaattcatcctttgtttcaaaagtgggaatgtcagtattagagtttaagtaaggcagtccataaagcatttcataaggagagaggccagtgtccttttgcggggctgtttggactctgaacagggcaataggaaggcattttgtccgaggtagctgggtttttaaaattagttgggttaaatgattttttaaagtttggttcattctttctacttttcctgatgagggtggatgccttggtgtatgatattcccattttattcctagtgcttgagtgagccctttaataacgagggcagtgaattgggttctattgtctgaatcagtgttttctataattccaaacctaggtataatttgttttaataaggttttaactacatgtttagctgttgtgtttgggaaagggatggcctctacccagtgggtgagatgatctactattattaataaatagttaacatggcctactgggggcatttcagtgtaatgaatttgaattttttggaatggcgttaaccctgagttttttcccccaagggcttgcatcttatttgttgatttattagttttttttgcatattatacaactatccacaatttacctagcaagggtatagatttctatacacccataaactccgagagcggcatcacacatagcctggggaccccagtgagttccttgatggagttgagacaacatccctcttatgagaggtttaggcaacatttccctctcatctggtaatattcgtttttcttctgagctttctttggctcctatttcatttaacttttcttgtttgttatgggaaaagacggggactgtggctgggggagggagacaaggagttaaatggaaaatgggttcccgttggggaagaggcagcttgcttggctatttggtcagcaagattattccctcagcttctaaaggaaagatttctttgatacctgggacgtgaacaacagctatttgttctggcaactatagattttctaatacttgaattattatgtccctgtggactaagttactgttaatgaggccttgctctgttcaaatttttccaaggtgtggaccactccaaaagcatacttggagtctgtataaatagttccttcctggttttgcagaaattttaaggcttgatttaatgcaaacagctcacatgtttgcgcagagcaggtgcagacccgttattaggtaatcttcccgattttatttctgtgaggatatctccgtttactactgagtacccgttatgccttttttcttttattacttgcctcgatttccttcttttgaccatacatctggatggatgtatcctttatctagggtagtgagcaaatttagggaggggaggaatttttcttggttaacatagaggtctgggtttaattttagcattaaatctcttcctaaataggtttgttcctgcctccgggattaacagaagtttaatatttactgagcggtccttatatttaatttctgtttcttctaagatttttgctttaaacccctcttcttttactcccgaaataaaaagtttttcctgtgaacaagttacaccagggggaagataacaaactgaggagcgagcagctcctgaatcaatgaaaaaggtgataagctcaggtttgggtcccacctctaaatttatcaagggctcttggtgggacttgaggtaaaaaaaagagtggagcccttgaccgccgtattcttcctccaaggtcatgagtagaatgacttctttctctttttcccatctgggacattcctttttaaagtggcctatttttccacacttgaagcatttgttttgcccttttccctctctacttttgggttctttggctgtgctgttttatagcctttatatggcctggaaagtgggggcttaagttctttataggttttggcccctgagtgttctgttgtggggcggacagcatgatccttgctttttgtttttgcttttcttttcctcgtcttttcgtacatataccttttgagcgtctctcaaaagctgctctatagatttatctttccagttctctattttctataacgtgttttgtgatgtctggccaactattggtaacaaaatggagctttaacatcccctgcccaagagggtcttctaaacctagacctgcatatatcctcgcttgctccttgagcctttctaagaactctgtaggtccttcatccttcccttgttgtatatagaaagctttgggaatgttttggatgcggaatacagatttttgagttcctttaattatcagttctccaaggtcttgcatattcctccagtaggctgcgttgttactatcccattgaggatctgtggccgcaagtttttgctcagctgctgggacgttctgacctgggggatgctcacgttcccaaattgtcatagcagccctgcgaatcatgctcctgtcttctcctaaaaagcgaatacctaggatagacattagctcagcccaagtatatatctggggtctgagaaattgattaatctggtcagccactatataagggtcacttaagagtggtttgagctccctttgtaggtttcggacctctgagctagttaatggagcatttagcctcctctgaggggcacttcccttaaggggaagagagttggagctaactctttagaagtggtggggaaagggaagttttgaatatcctttttacattgttctgtctcgcaccgaagtcttcctgggggagggccctgaggctgggaatgattccaggagttaggattataaagagggggcacaacgtgagtcgggggaagggtccagggcggctgcctgagggggagggaggtgagaggtatctggctgaggcagatggtctaaaggatcccatgtgggttgcttaggggtgggggccttagtttctatagggtaagtagtttctggcttattcttactggctttgagggggtagaggtggacaggcccctgccgtcagcacagggcatagcgtatctcctcctgagggacaggactcttgttattcacatactctattaaaagttgacaaatccaatcctcatttgacccaaactgtagccagaaaactgatggtttgaggatagtttccttagtccaaataaaacaacagtattttatcatttgttgctttttcttatttttagtcctttcattatctttccagtattttagcaggagacctaaggggctgtcccgggaaattctattgtcttgcttggggtatttcgcatcctggagaaggtgtttttttgagtttgtgaggctcaacctctcttactagagatttcttgcaccctttctttttttctttttttttttttaaggtggagtcttgctctgttgcccaggcaggagtgcaatggcacgatctccgctcactgcagcctctgcctcctgggttcaagcgattcttctgcctcagcctcccaagtagctgggactacaggcacacaccaccacacctggctaattttttgtattttatttatttatttatttccttggtagagatggggttgcaccatgttggccaggctggtcttgaactcctgaccttgtgatctgcctacctcagcctcccaaagtgctgggattacaggcatgagccactgcgcctggcctcttgcactctttctttagaggcccaaccccccttacttgagatttcttgcattcttttgcttctgcttaatccttctctggctgcttcctttgtgggaattttcaggtcccccttagcgttggtgggtcggtatgatcccccgacaggcaagacaggcaagctgtcctaagctgtatgaggtgaccacggaaccacagatccggactccacactcaattgtgcgtctcattcacacactttcaacctccaggatgtcctgaccaccaaggaaatactgcactgccattgtgttttttcttaacctttgtctctgcacagagttacctggtcactgtggtatttgtaggcctttttctcccgcgttgctaagcgtccgggtttattcgtcacaccaggtgggtctcgatccctaacccttgaggccaccacaacgaggcagtgggacctgtctcctcacgagtgaggactggagacccttccccagaggagaatgggaatcctggatgggcccccagattgttgggaacaagtaagctgtgctcaagagaaaaactagcactgagacaaaggatttctcagcaaggcaatttacttttgcagaagggtgccgcctgcatctgttacgactgcaagagcacactgaacaaaggagggaaggggtttttatccctaacgcagttcctgtcggtgtccttcccctgttggctaggattggactgtacaatctaaactgatcccagttggctaagacttaaaacttttttgaataggataaacgcatgatttgtaagagaaagaggggataggagcagtctgtctgttacagtacaaggtatgtctggacttgtgtgagcatgtcagggcacaacaagagcaggagggttgtttgcaggccagaaacaagagagtataaggaggttgggcttctgaacaaagaacaaggacgttacacagttaaaccctttgaagaggaattcatcatctctggcgctagtattgttgcaggattcaggaggacgagagagagatctcgggttaaaacaggagaatcttttattgagtgcactcaggcccagcagattcacacccaaaggttgggctcagaacaaagacagcacttgacttttatacacacttcacagaagggggtgggctagctaaagcaagcttatagtggcgtgaaagcagggatacagaggtgggacaaagacagttaattaaatcgttacaggttcataactcaggattgcacataactgttgctatgcaacccagatgtccgttatctgtgtttgcctaggcatggacttatcctataaccttcactgtggtgcccgggcagctgtagttccggcctactcaggcttttcatgaccttcattgtatttcttagataaaacaatacttgaagtcactagttacagagaacaggaatctataaactcattctataaaacaaagaaaaatttgttttttcttctccctgtgttgagggagtgctgggaaagtctccagagcacattagataatattatcaagacttttcctgggtctcggctgtgcctgttgctgcctctgggacaaatcagcctaatacaggaaaacttatttctctttcttttaaattttatttttctttaatttccggcctccgtgtagctgagcccagggctttttatgggctcagaatagggagtgtgtgctgattggtttgtgagtatgcaaaaaaggttaaagtgaagacaccactcaaaggtgggcatgatagtgtagaaaaccaattaggagactggacatggtggctcatgcctgtaatcccagcactttgggaggccagggtaggtggatcacctgaggtcaggagtttgagaccagcctgaccaacatggtgaaaccctgtctctactaaaaaggcaaaaattagctgagcgtggtgctgcacacctgtaatcccagctactcaggaggctgaggcaggagaatcactcaaacccagcaggcagaggttgcagcgagccgagatcatgctattacactccagcttgggcaataagagcgaaactcagtcttgaaaaaaaaaaagtaaaccaattaggaaaggataggtatatgtaaaataggtgaaagacggatcaatcagaggaaactgtgccaaatgagaaggtgggttctcagtcccgtgtgaggatttacccaggactctctccagattgaaggttggatttcactggggacctgctcctgtctgcctaggcatttgtctgcctcctgcctctatcagtatgtttgttaaaattgatgaactaatattgacaacattattttttccccactggatgtctcttacacaataattatggttttttgtttgttcgtttgtttttgagacagagtctcgctctgttgtccaggctggagtgcaatggcagagtcttggctcactgcatcctccacctcccaggttcaagtgattctcctgcctcagccttctgagtagctgggattacaggtgcctaccaccatgcccggctagttgttgtatttttagtagagacggggtgtctccatgttgttcagagtgttcttgaactcccaacctcaggtgatccgcccaccttgacctcccaaagtgctgggattacaggcgtgagcccctgcacctggccaattatgttatttttaactagaatctgtagtttaggttcactctgtgttgtacatgtctttggattttgacgatgcaactttacacatccttagaaatccttctgattaagaatgaagcaaagacattttttcttcaacttaagtttattattttttcaaatggttactaagttattaggacataaatgctttttaaattgtttggacatagtaacttaataaatcatcaatttttttggtcttgaggcaccatgaaagttactgagacatcaaggaacacatgtgacagtgctgaaggacaaatgtacccagatgagctggtcaggaatgtctgagatgattatgttcaggacagtgagcaaatttaaaacatagagcccccgggctgatgtctgagatgtccgtattgagatcgttcagaaatgtaacagacagtagaataatgatgggccttatttttctaatttaaatttaaatgcaaaagatacaattgatcaggcatactagattatactttgaatttcatttgaaagctcagtaactctatgtcagcctattaaatagtgttaacaaaagtttccaggtagtcttggctggaaattcttgaagaagaatacattaaaagtactttaagagaaaatattccagaagaccttgttaaaccagttttagctatggttagttgcatgtatgttagtttcagcaaggagagagggaatagtgtttgtctttaactagaacaatctgaaactgaccccctcttaaaacattatatctaatgctagatctgaatagtagtcttgctttagccaaatgtagacatgctagtgttttagcagatgattatttttcttttgagcataattttttgtttttattcttgttttgtgcttatagcagtggttcaaaacttagaagctgtaatcctctgctggatactgtgaaataactgacatatacctagttcttttgtatggaccaggaacaattttgacaggacacatggctgtcctatgaagagtataaaatcatagccactgtcattgggggacagagttgggggtgtcacagagctgtcaaattaggtttggtgggtaatgccctagttctttgctaagatttgcttgcctgcccctttgtactcgtggctttttccctttcttcccctccccccccccttttttttttgagtgcagtgttcatgcactagcacttgtttctaggacccaaaggtttagggaaatttatggcagaaaatcttaaagcggatggagctgtatttagtagcagcttctcttgctcttgaggaggagaccgtcgtcagtaattttggttcatagcactcccatcccacctgccactcagagctgcaagaacacggccttccagaatagagtcaaacacagtgtgggtgtcactaacttgagttattttaagaggtcaggaaacaaacctactactgtgtgttttttgacattattttaaaatataatgtggataaatcagatgagtgacctctctgtggaattaaaactttttacgtgtgaagtttttaattttgtgggtaattttttcaaggtcctttagaattgtgtcactgttgcctgctaataaagtcatgtgaaggtctctgttaaagcagtggtccccagcctttttggcaccagtgactggttttgtggaagacagttgttccacggattgtggggtgaagggggatggtttcgggacgaaactcttccacctcagatcatcaggcattggattctcttacggagcatgcagcttacagagcgtgcagcctcaatcccttgtgtgtgcagttcacaatagggctctcactcctgtgagagtctgatgctgccactgatgtgacaggaggtggagctcaggcagtaatgctggcacgccggcagcgtggccacgttctcagcagcgcacggaccggtaggagctggggactctctgtgtgttaaacgaaggtagtccaggtgaagttcagcataggctggagggtggaacacacagatggtcgctggatgtagtgacctttccttgtcacaggcttaacaccccaggtggcacggataccttgaagagccatgctgtttcctaagagaaaacgtggaatttggaagagattttgaagtttctttctcctgtcctctagcaagaatatatatcatgtctggaactcttggagcaaaggagtgggtgtacgaatggaagaagctccgatgggttgatgcagaatatctcacagccctcccggtgttggcccattccctgtctgttgtgtggtatgatgtgtgttgaaatggctccttgatcaaaagtaaacatagctgctttataccattgcgtggtaaactgtgaaggcaggcattgagagaggggtggtaaaaagaacctattcctggtcaaaaatgctaaaatacttggaagtgcaaatgttttggtgcgtggcatgtgagcaacatgtttactgtctgttctttcagctataattaatgccttccacgatactcatcataatcataccttaatgagaaggccctagaaaagaaacccaaccttttttgttgggttacttcgcatctatcatgatactttttcctttgattttatagcactttaggatgaacttacttttccgtgctaaatgttagctttggagaaagtgtatcatcagaaccatggagtttgaggtcttctaagatgaagttcataatttaagctttatatgtgtttgatctcagaaatgtcttggattatgtcaaatttttactttttttctttttttttgagatggagtctcactctgtcgcccaggctggagtgcagtggcgcgatctcggctcactgcaagctccacctcccaggttcatgccattctcctgcctcagcttcccgagtagctgggactacaggcgcccgccaccacgcccggctaatttttttttgtatttttagtagagacggggtttcactgtgttagccgggatggtcttgatctcttgaccttgtgacccgcccgcctcagcctcccaaagtgctgggattacaggcatgagccgccgcgcctggcctacgtatttgtttttaggtttttattttgttttgttttgttttgttttattttgatgttatgttttgttttgttatgttatgttatgttatgttatgttatgttatgttatgttatgttatgttactttatgatgttatttttttgagagggattctcacacagtcacccaggctggagtgcagtggcgtgatcttggttcactgcaacccctgcctcctggtttcaagcgattctcctgcctcaacctctcgagtagctgggactacaggcacctgccaccatgcccagctgatttttctgtttttagtagagacgttggccaggctggtctcttaactcctgacctcaggtgatctgcccgccttggcctcccaaagtgctgggattataggagtgagccactgcacccggcttgtttttaattttagtattgtcattgtattttcttgtttttgtttgagataaggtctggctctttcaccccgttgggagtgcagtggcgtgatcatggctcactgtagcctccatctcctaggctcccgcgatcctcccacctcagccttattttctggtttgatctaagcgcagattaccagtctgctgttgtgacttgatgcgtttatctcactgaagactggtacccgaggcagctgactttggttgaggtgtggcacttctttccctagttaatgtgcatgccatgtaccattgtgagtttgccagaagcggcctttgatcctagctgtggttgctctgggctgtcagtatttggacaagtggacgggtatgccgtaactgctgggatcctgacttttctttgaaagggctcaagtttttatgaattttagtttttataaataccttattaggtatgaacacatattcacaaatagcatgcaatttgaaacctcggtttaccagtgaactaaacagaagttgtttctcttggtagccttctgatgaggaaacgaggtggggtacaggagcctacagaggactgaattgtgattacaagtagtcttcctgtgtccttgtcactcttacggtctagaagtagcttcgatgtttatttgcttggagtttcagcagcagaccgcggtgcttgaagctgttcatggaatgaccgcttgtgtctgagccagcgtctgaggaaactgatgttctataagtaggtctgagaggcttctctggagttggcccatgtcttgctccctcttgctgatgctctccctgccaggaatgttcttctctctctgggtttctctttagagccctctgcagacatcaccaccccagcaaagccctctgtaaccatccaacctgaagtggtttccccctgaatagcttaagcagatttctttttgttaatacagtccagttggtattaatcaccttctttctcagtcttcttttctattgctgtatatagttatacatttgtttttgtttttgagacagagtttcgctcttgttgtgcaggctggagtgcaatggcacaatctcagctcactgcatcctccgcctcccggattcaagtgattctccagccttgcctcctgagtagttgggattacagtcatgcaccaccatgcccagctaattttgtatttttagtagagatggggtctcaccatgttggccaggctggtctcaaactcctaacctcgggtgaggtagtctacccacctcagcctcccaaagtgctggggttacaggcgtgagccaccccacccagctagttatgagtttttctgtcttgcctctctaaataagccatgttcctgtgccttccacttgtatattccttagaatttttagtatagggcctgcatgtggtaggccctctgtaaagagctgttactttgatagtgtgtgaattatagaattagaactctgagggactttggtcagtttgccacgttttctttctttttttttttaatgcagcctacaaagttggacacattttcttgatatgttgaatacttgtttctttgagcactggcagcttgtagagagactgaggccgtagttagttgtcttacttactggttctttccagggtaaaaccagatctgtgtataaatgagtttgagggtcgtgtctgatgctgtagaatatcccagtggttgcatggaaaacagctggcttggtgtgttggctaaactgggtatgaacatagctcatgttaaaggtaggctctttaggttgagtttgttttgaatgggtttttctggtggagtgcagcattcagctcattaattttcaagttgaaatgtcgtcacaaaaatatggctttctttagcacagtactagcttttaatatgtcaaaattgcattcaaaggttggttaaaagctgaaagtgctgttgccagccttccaaattgcaggctcagaaatcccttttgaaagaggaagagtgggtgtaggaaggtgggaggaagcagttacccgggaggagcttcctctcagggtcaggttgatgaggccctagttttgtttttattactgaaacaattgctgtgtaaaaatgagtgagcaaatgattacagtagttatttgtcttacagaaataatttttcctttaaaaaggatacatcaaagaacctttctccctctctgaggaacttacttctgggagagttcatttcgtccagcctttcttgactgtgtgtttggtaaatgttgggcgtgattaggaaatggctggatgacactgtggatacctggaaattgctgctgctcttccggcgcagtgatttgaacctgggagagttgaaaaaggggttcttcccacattcttttagtgcagagataaaacgtgaaggcctgctgatgtgggctctgtggctcaaacggggttttaaaaatagagaagctttccagaaaagtccaggttgctggctttgcttgaaaagcataagctccccaggccgctgctcctcctagccccaaggagctggagccagtgctgaggccccaggagaaggccccgtcccgctgtgctgcgcaccaggcctgccaccacctcgaccagagcttcgggcagacctaaaatttgtacacgttttcacatctaaaacgtggcagtgttgtatttaatgagttattgcaaaagacaataaaaactgtaggttgatttcttggtttgtaccaatctgtgtagcctctgactctgtcataaaagcaggttttattttacatgtggactttctcccctaaagctacctttttcaaactattaatggctttccaaactttttattatgagtaatgctcattttttaaaaagttggtagaaaagtactgtgaacacctgtatgcatgtccgctaggtaaattagcacatttgctttctctgtctctttcacaaacacatgtgcacatacattttgtagaaacatttgaaagtaagttgctttatgtcatgacactttacccctacatactaaaacatgtattgcctaagaatagatattcttctgtctagctgtgattattatcacaggcaaagaatcgtgcacctgtggtcccagctacttgggaggctgaagtgggagtatcgcttgagccaggaggcggaggatgcagtgagccaagactgtgccactgcactccagcctgggtgaccagagtgagaccctgtctcagaaaaatacaaataaaaaataaaaaagtgttattcaatatgaaacgcatggttgcatttccttggttgttccccagatgtttcgatagctatttttattccaatccaagagctaatgcagcattgcatttggttgttctctctttagatgcctttattctagacagttccttgctgcttctgtttatctttcaagactctgacattttttttttcgtttaagcgtctagggtggttgtgtagactgttccataatttgggtttgtctgatgatttcctcccgagtagctgggattataggcatgcgccaccacgcccggctaatttttgtatttttagtagaaacatagtttcaccatgttggccaggcgggtctcgaactcctgacctcaggtgattcgcttgccttgacctcccaaagtgctgggattacaggggtgagccaccatgcccggccttatttccccatgattagctaagggtcagccatctttgtcctgagggccgcagaagcctgtggtgtttgtgtctgcttccgctgcatcacgccaggctctgtggctgtcctgttgctggggctcagttcagtcatttggtgaaggtggtgcccatgagatctttccattgtaaaggtacccacctttgttcctttgttaaatttatctgtaacctgcaggatgataatttgaggccctgtctcttctgaatgccttacgttagcattcattgatgatccttgtctgaatcagttattgtgcattggtggctagaaaatggtgatttcctaattggcaatccttctgtgttgattagattttttttttcctgaaaaattttctcccctgttgagtatcactatgtggtttataatgctttgccacccttttttctttctggtgttcaaattatcccagacttggtgagtggagccccttcaggctggttcctctgtcccttgggcatatgcccatctgagcactcccttgcctcctggtgagaaacgtttctgcctcgccttgaccttcccttgctccagacttgtaatcaaccgcacggattcctttgtaatagggactggtatttggaaatcaagatctggttgccaggtttgctcatcatgaactgagatgtcattgcttttcaccccttccaatggaaagagctaggagctagtacatagattgatgtttttaatcaaattagaatgcttctgtttttcagggcctgcttacatactttgtagaaactcgcgtggcttgtagctcatgctgaaaaactcaggttctggtacctaagccatcccagagatgaaagttacatctactttttgcagtcttttcatttccagaaccctccacagttagaattgtgtatgctgacagtatgcagaatctactgaccttaacatatctctgaaagacgggtcagggtaagagagtgcagaaacaaaaggcaggacttatctttttattgagtaagattgtattgtatgcttcaaaacatgttttttggacaaggactttgttttaggcattgaagtcctcgttctcctgaggataaaaagtctctgccctgcagcctagcagtgcatttggtggcagagtgacaggcttggaagagaatgtggagggagtaagggaggcgcttgctaactgcccctgacgctgacagagctctggagaggtcagtgcagcttctgagttagctgctccttagcctggataccttaaatgccatctggttgggcatgccaaggtaaagtgaacgtctgtgcaaatatgagtctacgtggatggagaattttacagggaagggaacgtttttagtgtggttgaaattcaaggtgaggctgcgtgggtgacaccttatgctgaccactcttgtttcaggaattggaaggatggtgtgtgtattttgaaaatggcctagttctagctaaggctacctcttagtaagtgcttactctgccctatatgtcacttaaaaagattcattttgtttgaaacctttgtaagtctcaatttcttggtacgtcacagtactggaatgtacaaagccagttttttttgtttttgtttttttaattagagtgcagtggaagtcagtttagatggttttcagtgtccgtatagaacaaatggtagccaacctgttttcctaggaattgttcgtgttcggtacttaataaattcttagggctttgaatgggacttatctgtggtgggatctgagcaggtgattaaactgcttaagtgttgtttacataaagtgtatgaagagacagatactgagtgatttttcaagattctggcagtaatgggattcagaacatgtttgagtagaagaggggagcagataaatataaagaatatatttttaacttccaaagtaagaacatttaagaagcaaatataattggctaccacatgtgggttttgcatcctttccagaccatcctgcgcatgagtctcttattaattttctgaaaatgtgactctggccacctgttcgtgctccctccatcccagctcctggagaggaaggccagggccttctgtctgcacccggcaaggcatggtctatgccacatcgtcatgcaccacagtgacccctggcctcacctctcaccacttccctcccctgggggctgtgggtcctgccgccacctgaggttgccttgcagtcgcactcctgagttctttcctggaaacgctctccgcctcgctggctgtgaacagaccctggcacgctttgaggcccagcctgcatgcctcctctctctcaaaggctttccccacgctgcctctccacgcagagcgtgttctcccccttctgcctcctggcacctgcttatccttctgaccctcatggatgtcattgactcccttccctccctcctgtactgactaccatggtcccttgtgcgtaggcagctggagtgtagcatgtgcttttcacatcgatttaaccttgtaacgttgtggagagaaagtgagatacaggcaagaaaactgagggtgactttgaaggaattgtagtaaaaacccaggcggaggaattcctgtgattctctagtccttctgggatcttgatggcagtatttgtgatctgtgtattacttctgttcagaagggcagtcctgttgaaggtaaacatcagggaattgctgccagaaagggagtgtttttagtataataatggtctgaagctacttgtaccttgtcagaagtaaaatcaaagccatttgtgccattttcattaatatttttaacaccaaaggtttcttccttaactctgtttttggttgtgattaatttaagatgggaattcacagttctaacctcgcctcatttttagtacaggttgagcatctcaaatttggaagttcaaagtctgaaatgctccagatcaaaaactttttgagcactgatatgatgctcaaaggaaatgctcattggagcattttggatttcagatctgtggatttgagatgctcaaccagtaagtataatagagctattcccaagatccgaaaaaattctgaaatcagaagcacttctggtcccaggcattttggagaagggatgctcaacccatacaaccttacagaggggtgacatctatcagtcaagcaagagtcatcctgcagtaccttcctttataatggggccgaccacaggggcaggcactgggtttcctttttcaggttccttcttacagcctagattcttactaccctatgccccccccccacaccccttttttctgagacggagtctctctctgccgcccagtttggagtgtggtggcaccattttggcacactgcggcctctgcctcccaggttctagtgattttcccacctcagcctcccaagtagctgggattacaggtgtatgccaccgtgcccagctaatttttgtatttttggtagaaatggggtttcgacatgttggtcaggatggtctcaaactcctggcatcaaatgatctgcctgccttggcctccctaagtgctgggattacagacgtgagccactgcacccggccttattcttattaccctatatcctatgacttccagttcacatgcaccatgggctactggaattttttttttttttttttggagacagggtcttactcttactctgttacccaggctggagtgcagtggtgcaatcacaggtcactgcagcctgcacctcctgggctcaggtggtcctcccatgtcagcctcctgagtagctagaactacaggcatgtaccaccacacctggctaatttttatattttttgtagagatggggttatgctatgttgcctaggctggtctcaaactcctgggctcaagtgatctgcacgcctgggcctctggatcgcttaggttttaatatgaattctgcaacatctttagtttggtaatctttgtggattgctacagagtaaattaaattatttacaaagaataatattgaataatttaattattcacaaggaataatcttgaaagatctcatgtgttctttactcatcttcccccagtgataacgtcttgcagaactgtgtgcaccagcacagtcaggatgctgccgtgcgcatagtcgagacgcagagtgcttcccaggcatctctctcatggcccttttacagccacacctgcttcgctcctgtccccaccccttccttagccccggcaaccactcttctgttttcggtttctctagttttgtcttttcaagagtgttatggacagggaatcataccgtatgtaactgctgaggcttttttttttttttagcttagcataattctcccacgattcatccagttcctcacctggatcaatagttcattctttttttttgctgagtagtgttccgtggtgtggctgcagcgcagtccatttagcctcactcaggaaggacatctcggagttgtttccagtttctattatgagtaacgctgctatgaatgtttgtatatggggttttgtgcgaacataagctctcattgctctgggataaatgcccaggagtgcatttgttgggttgtataccgttgcatgtttaggttttaagaagatacctgttttctggagtggttgcaccattttacattcctgccaatgatgtggaagggattcagttcttccacatcccaaccagcactgtgttttattttagccattctgatagttgtatagtgatactcctttgtgattttaatttgcatttccctaatggcccttttctctaatgaacatctctcgtgtgcttatttgccatctgtgtgtcctctcaggtgagatatcacttcctgtctcttgcacattttctaattggactttttaaaactcttgagttgttttttttttttaatcatggtaaaagcacatgaaatttaccatcttaaccatttttaaatttcaattgtgtgtcaaaagacaaaattacaaaaaaatttagtgtatggatcttaattggcttttttgattccagaatcaggcaacacctcattctataaaacagaattctgtgaaatagaatgagtgttctcatgagctgagcaggggaagctggctttgtagacagaaaaggggtgagggaaacagacacagagaacagagagcagatgggtggtttcagagtgacttcccttgtaaaggttaacgcagaggggacttccttaccacgctggcccaaactggcccatttgggggatttgctgttctctttctcctgacttcttgcaaagtcagataaacaacttacttttggcttggtggtatggaggttaccaagagggactccattttggtttggtctgctgggcctggtgcaggagctcagtccaaaccagtgttctcctggctcactgtatttatgttgagttttaagaattttttatgtattctaggcactagtcctttgtcagatacatggtttgtaaatccctcctcccattttgtagtttgttttttcattctcttaacaggggttttgttttgttttgttttgagatggaatctcactctgtcgcccaggctggagtgcagtggcgcgatctcggctcactgcaagctccgctttctgggttcacgccattctcctgcctcagcctcctgagtagctggaactacaggcgcccgccaccacgcccggctaattttttgtatctttagtagagacggggtttcaccgtgttagcctggatggtctcaatctcctgacctcatgatctgcccacctcagactcccaaagtgctgagattacaagcgtgagccaccgcgcccggccttaacagggtctttcgctgagcaaatgtttttaactttgaggaagttcattttatatattttttctcctgtggattgtgattttgttgtcacatctaagaattctttgcctagcccaggatcccaaagattttctattttttttccctaaaagttttagttttgtgttttacatttaagtcgctgatctttgagttaatttttatacaaggtgtgaggtttagatcaagattcattgttattattgtttcagcctatggatgtgtaattgctccagtaacatgttgaaaagactggcgtgctttctttccctcattgcttttacatctctgttgaaaatcagtcggtgttccctgacaggtgcagatactaaaaaataaatcagttgggtgtatttgtttgagtctatttctgggttctgtattttgtcccatagatctgtatgtcagttacccctctcctaatactagatggtcttgattactgtagttatagagtaagccttaataccggggtgactgattcttcccagtttattcatctttttcaaaatcgttttagttgttctagttcctttgtctttccatataaattttaaaacaatcttgtctataattaccacaaagtcttgctggggttttgttaggaatgatgttacttatggggagaattgagatctttactaggttgaatcttccgatccatggacatggagtgtctttttcttctttaatgaaagcttcagatgtgaagacagttgtggcgctgcctgttgccgtgcaccgagaggtgctgttccagggagaacacagtcagcggcaggacatcaggttgtgtctttgctcacttctgctttcttggtttttaaatttataggcctatgaaaggaggttccctacatgtcctttgattccgatgttcgtgggcagtgacactgtgaatgaattcaagagcgaagatggggctattcatgtcattgaaaggcgctgcaagctggatgtagatgcacccagactgctgaagaaggtaaaggtcggaaaggacgtcttggagggaaagggcgtcctggtgggagagggcgtcctggtgggagagggcgtcctggagggagagggcatcctggagggagagggcgtcctggagggagagggcgtcctggagggcagcccccagagacaacatgaacttatactatagcttctgtgctattggttgttattaataaacccatttctctttcttttttttttgaagattgcaggagttgattatgtttattttgtccagaaaaactcactgaattctcgggaacgtactttgcacattgaggcttataatgaaacgttttccaatcgggtcatcattaatgagcattgctgctacaccgtgagtaatctgtcactcggcggaagatgttctgccgacatatggcttctgaggattgtttgatcaccattttaaacagtgcatctttttgtcttagagggcagttcttcattagatgttgtcactcatttctcatgtgtaggaggaagggtagcaggtgtggtctcctgcagagtgtattatgttgtcgtggcagttaaggcagccaagtgatgccttgatttggttttgttttttttttcttttttgagacacagtctccctctgtcgcccaggccggagtgcagtggtgcaatctcggctcactgcaacctctgcttcccgagttcaagtgattctcctgcctcagcctccctagtagttcggattacaggcaagcgccaccacgccaggctgatttttgtatttttagtaaagatggggtttcaccgtgttggcctggctggtctggaactcctgacctcacgtgatccaccccttggcctaattttttttttttttgagatggagtctcactcttgtcaccaaggctgaaatgcagtggcacagtctcagctcactgcaacctctgcctcccaggttcaagttattctcattccccagcctcccaagtagctgggattacaggcactcgccaccacgcccggctaatttttgtatttttagtagagacagggtttcaccatgttggccaggctggtctccaactcctgacctcatgatccgtctgcctcgtcctcccaaaatgctgggattacaggcgtgagccaccacgcctggccttaaatattacattcatatgccacttcttttctggtcttactgtaatatgttagaaatatctaatgaaggactaagatgtgtgcctttaagaatagtgccgagagtgtttgtctgtctcagtatcttcactgcttaccaccctgtttcaagaacttcttttatcagatttttagaatactctcctgacagattgctgtatttctgcccttctcccctgcagtgtatccttaacactgaattcaaagtgatctatttaaagtatgtcagattaagtcacttctatgggctcaaaaccctggagtgtttccacagttcgcccagaggaagagcccatagtctttatggtgacttgcaagggcctgagttctctcctggttacgcctttcctgtccttgctgtcatgcagtgggcctcccccaggggctttggctccaaggtgctcgctgtgccgtgctattcttccctacgtctctagtctcacctcctcccatctcggctcaggtcaccccttcttggccagccccagccacccatttaattctgcagcctgactccccaacccccaggcttttttttttttcttcagggatgggatcttgccctgtcgctcaggctggagtgcagtggaacaatcagttcactgcagcctccacctcccaggctcaagtgatcctcctgccccagcctcccaagtagctgggactataggcacatgccaccgtgcctggctagtttttaaatttttttgtagggatgaggtcttgctctgttgcccaggctggtctcaaactcctggactcaagtgatcctcccaccttggcctcccaaagtgtcgggattgcaggtgtgaaccatcatgcctgacccccatccctggttcttttagcctgtgctccaagttttcttttttccatagcacttacttatctttaatttccttgcatactgtgtttctggctgattgtctcctctgttagactctgttgaaagcttccaaggccaatacctctttgttcatgatggagaagactgttcagtgagtatgttgaatgaatgaatgaagcaagaatgaaaatgaagctctccttttatagtcatctttgaaatgtttttgaacaattatttggatctcttcatgatttagaatgtgcttttgatcctgattttgaacatgattttggcattttttccatctgctgtctttatggtagtagcattgttagtaacgtaagtgtttttttctggttactggttaaactgaggagcaggcagatgatattctgttgtcaattcagtcagtgagagtgctttctctttatctgcaggttcaccctgaaaatgaagattggacctgttttgaacagtctgcaagtttagatattaaatctttctttggttttgaaagtacagtggaaaaaattgcaatgaaacaatataccagcaacattaaaaaagtgagtgtatcttgggattttgtggcagagggtgggcaggagtctctgagatgaccatctttttggaaggctggggatggcttagcaagggatttgcagcatttcttgggtggaagatgctatgatccctaccccctgcctcatctttaggtataggggttgaggttgtgctggttgctgatggaggaaggaggtgcctgtagctctagcaatggcactgtctgcctggagttgctgagagagttagaagttggggagaggcagcagcagctggcacacagcccccaggccttgctgcaggattgggaggaggcctgggggcctggggaggtgcttgccgagcaggctgccccccttggattgtcagttcttccacagaagaccttcctttctcgtttttgtgctgttgttcatcagttgttagggaattgtggttttgaaatctatccgtgtgggattatggagtggtttttgaaggctcattttcagggtactgtgttggaaagaattgaaattgagacagaaatcatatattgagtacaagtaccctaaatcagcattttaaaatagtcatataaaaattccatctcattagataccatttcctaaaccttggaaaataacaagtaaaataaacaaaaacacagaagcatttggccttttctttttttctattaattttgtagcaattcagttttattggtgttttaaaagcttgtgagggactgggcgcactggctcatgcctgtaatcccagcactttgggaggctgaggtggacagattgctcgagcccaagagttcgagaccagcctggacaacattgcgaaaccccgtatttacaaagaatacaaaaattagccggatgaggtggcatatacctgtagtcccagctactggggaggctgaggtaggatggcttgagtccaggaggtcaagggtacagtgagctgtgatcatgccactgtgctttagcctgggccacaaagcgagaccctgtctcaaaaaaaaaaaaagattgtgaggctcaccatcttccgttggctagaaaaaaagaaaaatcttgggagagatgagtaatttgaatgttgaatatatactcacctttaaattggttttgttttaaagggaaaggaaatcatcgaatactaccttcgccaattagaagaagaaggcataacctttgtgccccgttggagtccgccttccatcacgacctcttcagagacatcttcatcatcctccaagaaacaagcagcgtccatggccgtcgtcatcccagaagctgccctcaaggaggggctgagtggtgatgccctcagcagccccagcgcacctgagcccgtggtgggcacccctgacggtgggtctggcaggggcttcatcccgagagcaaggctagggaagtcggcgttgccgttttctctctgtttgctctgcctgttcccgcttccttggaacattagataactcagaaaggaaagacccgtctctcgtttctggcccttgtcctctcgcttatgtaatacattcattttaccttttattagattttttgttaataggaaggattatatcaagttatttttattcttttatggataccagaaggtgtttgtttgtttgtttaagaaatggggtctcactgtgttgcccaggatggtcttgaactcctgggctcaagcaatccttctgcctcggcctcccaaagtgctgggattataggtgtgagccaccacacctggcctaaggaaggtgtttttttttgtttgtttgtttgtttgttttgagatagagtattgctctgttgcccaggctggagtgcagtggtgccatcttggctcactgcaacctccgtctcccgggttcaagtgattttcctgcctcagcctcccgagtagctgggaccacaggcatgtgccaccacgcctgactaatttttttatttttttatttttgagataaaaaagtctctgtcgcccaggctgcagtgtagtggcacaatctcggctcagtgcagccttcgtctcctgggttcaagtgattctcctgcctaagcctcttgagtagctgggattataagcctgcaccgccacgcctgactaatttttatattcctagtagagacggggtttcaccatgttggccaggcttgtcttgaactcctgatctcaggtgatctggccacctcagcctcctgagtagctgggattacaggcgtgagccaccagatttcttacattctccaacacagtagctccattcaaaatagatttagatttgcttggcttttttttttccataaattttatatcttgcaagtcctttttgtgttatgttcctcttggaattaaaacagtcattaatatctattatagtcatgaatagtattgtgatttggcaatagaggtaactcagtggtaatcagggaaagataattgagtcagaaagtgtacctgtggtttagtcagtgatttgatctcagagcctatccctcaagtcctctaaggaatctggtttacatctgccatctctgcggtttcatgtgcctctaggactctaggaccacacgttaactccactgagcacaaagactttgggagcctaaagctccagtgttctttgttgtaaataaatgtcacttacattccagacaaactagatgccgactacatcaagagatacctgggcgatttgactccgctgcaggagagctgcctcattagacttcgccagtggctccaggagacccacaagggcaaagtgagtgtcagcaccacacccagtgtgcagggccagagctacgtgaaatcatggaatctctttctgtcatagtcaccaagagtgatattcccaacttccacggctgggaatgtttcttccagtttagaagtcattgaatttatgtctctgtggaatctaagtcgtttatagcaagtgataatgcatgactaactgcatttttctagactttacagagcaaggtctggctacaaacagtgtcacgtcacaaagcaacatgtgttccaagtattcacacattcaaattttcagaaggtgtaaaaagagttcagagatttatcagagattagaaatgtttgagctttaattttcaggtttttggtgaaattttagcctcataaaggtgtaaatttttatggtaagccttatgtagtgagcagagcctggtatgtgtctagcgagttattggcattatttagtaaagggaaactaggcattgcatgtatttggcctgatctctaattctgtcagcctgcttactagaaaccaaataactgagtgctgttgaataccagtcatcaagaaaaccactgcagtgatgatggccaccgtttgttgtcttcttaccatgtattagacactgttttcaggtctttattccatccttccggcagctctctctgctgctgtttttctcactggttttacacgtgaggaaactgaggcacagagcagtgaagtaacctgcctgaggtctcacagccagcgagtggtggggtcaggatttgaacccaggccattttgttccagaacctacattcttaaccacttccacgtaactgtggtcctttctgagtgaagatgatgccacgtcagtaggccacatgcttttgagttatttcgcaggagttggggtcatgaatagctcatgttcccacccccttcttgttctgacggaccagcctcttgagttggtaaacacatggccacggaggaagacacttggtccacgtgacactcggaacacggccttggccttgttctttattcagggaggccaacctgttgattgacagtaatggaacctggagaagattcctgcgtgttagtcagcaatactgccacatcatgaaaacccaacatgctttttttgtattctttttctttaatctgtagtttttgtttttaattatcttaagtcttatgatcactcataatttttaactttgtgtatatcttctctactttaatctttctaatgagttggcaaaagcaccattgccagtcacgtagacacatggtagttctacagttttatgtttttgaatttttttttttttatatatgtatacagagtcttgctccgtcacccaggctggtgcagtcttgggtcactacaatctctgtctcccaggttcaggctattctcctgcctcagcctcctgagagctggggttagctctgccaccattgctggctaatttttgtatttttagtagagaacagggttccaccatgttggccaggctggtctcaaactcctgacctcaagtgatccgcctgccttagcctcccaaagggctgggattacaggcgtgagccactgggcccaacctcgaatgactttttaaagacaatgctaaattataacttagtctgacttaagtagtaaagaattcaaaagtaaagtttaacttgctactatttcttgtcatactgacttttaaaagcatctgaccttatagattgtctataaaatgtgagaagtgttaaatattccttatttgatattacacataaactacactaaaatgccttttaataaataaagggaaccattttagatacaggaaattctaattagattggcatagttaaggccaaaaatataaagtagatattgctgccttatcttcagcctttgcctttaagaggcaaataaatacaaaatacaggtgagtcttgcttggttctgagacagtgaagggatttcctcagtatttaaatagagtcatatggccagttatgtaaacccaaatataaaaccaatctccaataggctttaagatggcatttacgatctttgtgaaagttgaacattactagcgaagtccagtcacatctttagaaggggaaagcagtgtagcgttactgaatcagaattattaaaattcagaaaaccgaacatagtcctttaaccacaagccagccttagttaaatcaggattgcccaaccaaactattctgatgatggttcatgatctgaattctggtgtatgagatctcttttttttttttttttgagacggagtctcgccctgtcgcccaggctggagtgcagtggcgcgatctcggctcactgcaagatccgcctcctgggttcacgccattcttctgcttcagcctccccagtagctgggactcaggcacccgccaccacgcccagataatttttgtatttttagtagagatggggtttcactgtgttagccaggatggtctcgatctcctgacctcatgatccacccgcctcggcctcccagagtgctgggattacaggcgtgagccaccgcgcccggccatgagatctgttaaattatgatatgcattaaaaagtcatgacatttctgttttgtaataagacagtgaccaattattactcattagaaggttttttgagataaactttcaagtctgcccttgccgtcttctttctttttttttttttttttgagatggagtttcgctcttgttgcccaggctgaagtgcagtggcgcgatcttggctcactgcaccctctgcctccaggttcaagtgattctcctgcatcagcctcccaagtagctgggactacaggcgtgcaccaccacgcccgactaattttgtatttttggtagagacagggtttctccatgctgctcagtctggtcttgaactcctgacctcaagcaatccacctgccttggcctcccaaagtgctgggattacaggcctgagccaccacaccccgccagtgaagaccatttttgttccagggattctccaaataccccatcagtgtgtcctcactccaggtgatgcttttgttcttattggcatctgtgtataagagaatccagcagcctgacctgtcgtctgcccggagagacggtggagatgtggcccagtcttgtgcttgcttcccttttccatggtgtggcactgggcggcaccctttggaacaaaaatcttgcctttctcaacatcatccatgtttaattctcttttgtctctggcactacgaaggtttccattcagaagccaggtgtcctgctctctctttattctaactttttatttaaatgcagtatgtatacagaaaagtgcaaggatcatagtcattcatagatccgttcatagagttgaagcatttgatgtttagggaattatttatgcctttgctctactttgcggaaacgaaaatgaaatactataaagattattcaaactgataatgctgattttctctagagtagtaagggagatgtttctggtaccacctcatttttaatagtataatagtgcagctcactgttgattagaagtgggagtttcaggccagacatggtggctcatgcctataatcccaacactttgggaggccaaggcaggaggattgcttgagctcaggcgtttgagaccagcctgggcaacatggggaaaccacatctctacaaatacaaaaatgagctgggcgtggtggcgtgtgcctgtggttccagctgctcaggaggctgaggtgggaggattgcctaagcccagtagttgggggctgcagtgagctgagatcatgccacaacactccagcctgggtggcagaataagagtccctgtctccaaaagaaaagtgggaattttagggtcttattcccttagcaactttttttttagggcagtaatgtgatctcggctcgctgcagcctccacctcccaggttcaagtgatccgcctgcttcagcctccgagtagctgggattacaggcatgcaccaccatgcctggctgatttttgtatttttagtagagatggcatttcaccatattggccaggctggtcttgaactcctgagctcaagcgatccgtccaccgcagcctcccaaagttcccttcacaacttttaacattgcttagaaatgtctttttctcttaatagattccaaaagatgagcatattcttcggttcctccgtgcacgggattttaatattgacaaagccagagagatcatgtgtcagtctttgacgtggagaaagcagcatcaggtagactacattcttgaaacctggacccctcctcaggtccttcaggattactacgcgggaggctggcatcatcacgacaaaggtaccggatggagttgaaactgtgtttccatcgttgtcttgatgtgtggttgaagatatcttccaaggcctccttccctggagttgagtggggcccccttgagtgcatcgtttctcctcactctgagaatttggcacctttcccaagttgaacagactgatacgtgtcaccacgggcacactcccgtcccgccccgggcagccaggaagggcctgggactgctctttcctcatggacacacgtcatccttgggcaaatgacttcacttgctcggtgcagtacagtttgttttgacctattaaaaagacagcagtgcctctggcagagtattttcagtagtgcagtgttaataaagggacttttcaatgacttaaaccctatgatagcttaaaacggttcagcccggttttctacatcacagccctgagcacttcagttctgctttgggagtaagtaaggcctggatgaaggggggcgatgcacctgaaatgaagagtggtttaaatgagaaccttaaaacacagttcccccaaatgccttccataccctgccttgcaggaagacctgcactgtcaaaaatacactctttcctgagccaaagtttgagagccgggcaggatggaattggaaacgtcggcgagagggaagcaccgtagaactggttcttttaccctctgaacaagtccttgcagaaccgagcagctcagctttgtctgtgattatgacttcatcttttgtattgttaaaaagtttggtagtaagacattgacaaatgtgtcttttttttttttttttgagacagagtctcgctctgtccccaaggctggagtccagtggcaagatctcagcctactgcaccctccaccttccgggttcaagcaattctcccgcctcagcctcccgagtagttgggactacaggtgtgcaccaccacgcccggctactttttgtatttttagtagagatggggtttcaccatattggccaggctggtctcgaactcctgacctcgtgatctgcccaccttggcctccaaaagtgcaggaattacaggcgtgagccattgcgcccggcctcaacaaatgtgtcttattaaacgttgggagaaactttctgtaaataggcctttccgtaagattttggagcacataaaaatgttttgctttaagtagaccaggtctagagctagactctcctgggagatgaagttcactaggtgacaaatacaagataaatgttaccctctaaccctctgccccatgctgggacgacactgctggtcttctggtaaccaccgaagacaagtcttggttccttttcaggagcacaatcgtctgtattcctcctgctgcgccttctgggactgtgcggcaggaggctaggcagtgctgactctagggatacactatggccaccaagctctttttcccctttgtgtagatggcccatgatgatagggcagtatgataggagttaggctcctctcaggcggcacccattagacctccaggctataaagaagtagagtcaggccaggcccagtggctcatgcccgtaatcccagcattttgggaggccaaggcaggaggatggcttggacccaggacttcaagactagcctgggcaacacagtgagttgttgtctctacttaaaaaaaaaggaggctgggcgcggtggctcacacctgtaatcccagcactttgggaggctgaagcgggtggatcacctgagatcaggagttcaagaccatcctggccagcatggtgaaaccccgtctctactaaaaatacaaaaattagctgggcgtggtggcacacacctgtagtcccagctattcgggaggctgaggcaggagaatcgcttgaacctgggaggcggaggttgcagtgagccgagatcgtgccagtgcactccagcctggcgacagagcaagacttcgtctcaaataaaaaacaaaaaaggaggcccagcacagtggctcacgcctataatcctagaagtttgggaggcggaggcaggcggattgcctgagctcaggattttgagaccagcctgggcaacacggtgaaaccctgtctctagtaaaatacaaaaaattagccgggcatggcagcgtgcgcctgtagttccagctacttgggaggctgaggcaggagaattgcttgaacctgcaggcagaggttgcagtgagctgagatcgtgccactgcactccagcttgggtgacagggagagactctctctctaaaaaaaataaaaaaataaaaaaaaaaaaaaaacagagtagagccaacacaggctgcttggtggggttttaaggatttttagaatgttctcatttgtcttggtccttagagtgggaattgagggaagctggcttttaaaaagctttcattcagtttttagtaatctatgacatgaaaaaaaatgattttctaagaaagaaaattttaaaagtactctgtagtcatagaaaaagtgtctggatagtttgatgttcccttgccgttgaaaatcagagctcttgggcagccccagttgttcaaagtgagcccagcttatgggcagttgttcagactgagcccagcacttatgcagctcgagctgagtgagtcccagccggattcccctcatcccggcacagccttctatttccaggaccctgcacagctaccctgtcagttggtttttatttttctcgcttacagctttttggggtaaatattggacacacaccccctatcacacaaatcagttgccacttctaagaatcagaaagacttttaagcgcccctagaacacaggcgaacacatattcctgttaagggtcttagagttgtatcctcagtttcaactgggatggtgctgacaactcattccttcccctcctctgcagatgggcggcccctctacgtgctcaggctggggcagatggacaccaaaggcttggtgagagcgctcggggaggaagccctgctgagatacgtaagtgcgcggctgcgagactccaggtgccactgtggcgtcactttttttctctgccagtaggattggggtgttaaccagcctgttagaacaaacatgaattgcttatgtagttaggactgaaaatatattaatatcgtcttaaaatttcaaaaggagacacagaagttataaaagtgtttctcacagtggaagcgtcagtgaggcagtcagggtctcccccgagatgcctgtgtagcagcagtttgagtcttttcattcactcccatgtggaattgccctctcttgggacgccactcacagcagacctcttgatagcattctttccactggcccttcgttaacgcgagctcttggcgtctttctccagaccctcctgaatgcctgctgacccatcatctcgctgactccagccaggccccgctccactgctgccgccattggcagctgtgcttccccctcccagagaagaagatggtccttcaatttgaaaacaaacagaaacttaaaagacgtatttatagccccattatcctgaaatacgcatttttggctttattttttattatgttttttgagacggagtttcactcttgttacccaggctggagtgcaatggtgtgatcttggctcactgcaacctccacctcccaggttcgagtgattctcctgcctcaacctcctgagtagctgggatttcaggcacccgccaccatgcccagctaattttttcatatttttactagagacggggtttcaccatgttggtcaggctggtctcgaactcctgatctcaggtgatcctcccgccttggcctcccgaagtgctggaattacaggcttgagccaccctgcccagccagctttttttttttttttttttttttttttaaagagacatcgtcttactctgttgctgaggctggggtacagtgtacagtgtctattcgtgggtgtcatcacgactcactgcagcttcaaactgctgtcctcaagcagtcctcccacctcggcctcctgagtagctgggactacaagcaccaccactgagcctggctcactgttggcattcccttgtgtattgtgttagtctgcccccaccgctatgtgtgtttatatatccccacatgcacacgttcacacataaagatagggatggactttatctacaggggaggggtttattaacctaaagcaaaggatcgcttgagccatgccttacatctgttctcaggctgccttttctcttggcgggcacatgtggtatcagagtgttctcacactcacagacattcatctcctgttcccatgcacttgttctgaagacagagccccagagccaggcccctgctcatctggggatacctctgtgcttcactttggatagccgttacctttgccacacatgacagtgtttattctctttcaaaagtagaatttatttgttggtggtgatgtgtttagcgcatgtgaatgtgtaagaaaatctccataggtgacttttttgatttacatgcttatctgtaatacgctgttagtgtccctcttccatagctggacgcggtagttttagccttaaactaatcatggtaaattttcatgcccttttgtatgtaggttctctccataaatgaagaagggctaaggcgatgcgaagagaatacaaaagtctttggtcggcctatcaggtagatgtgggattttgtttttcctttcaacttactgagaaaacgaattaaatatttctagttgatttttggaattaaaatctacttattattttccaaggtgctctaaaaggtagacaagaagtgaacatgtaatatgccagtgacgagggacagacagttagtgttttttgaccccaggcattgctgtgacgtcagccagagtgggttggcctgtctgcttagtctgtgcgggccgcaggagcccagggctgcagatcgtttgcttgtttttgcctcccctccccacccagatgactctgtgttcttaaaccaagctctaagttacagtaaagagttctgaaaatgtttagtgattcagaggttgacattgataagggtgtagatggttcactgggatgtaagttccatgagaacagggtttttgagggccttttgctgactgctgtattctcagctcctgggacagtgcttgcctctctctctgttgaagcatagcccactgcagttcagatgcaatatgtgttaaaataccagctgtgtgccctgttgatggcaggttggggggtggtttagcacgtcgaggacagcacactgtggctttgcttgccggctcactgagcatatctgagagagcttttcgtgcattatcagtcagccttaattgcagtttcaggccttggtcctaccacactgatcctgtgtgttttgtacaagtagatataaacagggttcatagcactatacatagcactataatttaaaaaaattgattatgatgtatttggaaatagctataaatgaccaaaaaggaagaaaataagacacagtttgctaagtgtgctgtctgttgaatgaaacacatctctgcacaacctgcagctcatggacctgcctggtggacttggaagggctgaacatgcgccacttgtggagacctggtgtgaaagcgctgctgcggatcatcgaggtggtggaggccaactaccctgagacactgggccgccttctcatcctgcgggcgcccagggtatttcctgtgctctggacgctggtgggttgagatgctttttgcagtaactgtgagccatttggaaagcagataacatgcattcatatacacgtgtctgtgacctaaagtcttaacttcttaggaaaaaaaacaataacatgcaaagatataaaatttctcaaattgtttaagaaaggggaaaaacaaaatgtgagtgtcctaatgccatgcaaatagactttacagaagaagtatataaacttgaatgtcttccccccaccctcccactcagaataccacattgtcattttaatcttggacactcaggcagcagagaaatatgactgcatggtcttctcctcctcacaggttagtccgttcattgatgacaacaccagaaggaagttcctcatttatgcaggaaatgactaccagggtcctggaggcctgctggattacatcgacaaagagattattccagatttcctgagtggggagtgcatggtatgtcctgaggcgaggaactgcacatttggccccttatgcaggtgggagaggtcggtgtcgatttgcacaaatgattttcagaacttccagttgtttggatgttttgtttttgttttgtttcttttggccgccatttctctgatccagggttaagctaaagagaaccattgaagtaattgttgatactgtacatttcttcattgttaaatacgaatgagaattcgtagaatcaaatacgattgcagcttgctttgattcacacggctttgtgtgaatcagatctttaaacaattttagaggagctgtcatattttctaaaatactgttaaaaaattgaatcagttctcaaaatttcccacccgcccctccccgtccttttttttatggagacagggtccggctctgtcacccaggctggagtgcagtggtgcgatcacagctcagcagcctgacttggtgggctcaggtgatcctcccacctcagccacccaagtagctgggactgtaggcgtgcaccaccatacccagcgaattttttgtagaggcagagtctcactattttgccccagactggatgacatttttggtttttttttttcttcttgagatggagtcttgctctgttgcacaggctggagtgcagtggtgcaatctcagctcactgcagcctccgcctcccagattcaagcgattcttcagtctcagcctctggagtaactgggattacaggcatgcgccactacccacagctaattgttttatttttagtagagatggggtttcaccatgtcagccaggctggtctcaaactcctgacctcaagtaatccgcccacctcggccttccaaagtgccgggattacaggcatgagccaccatgcctggcctggataacatttttaaagtaaaaaaacgaagggaagtggttctcaacatacgtttggggtttttaatatactgagttgctgggtaatgaagcagaggcctccacttctatatcctgtactcagagaagctcagaaccttggggtccttataggcttctagcccatggtgcacagttgtgtcttgggagcattacggaagccagagcctctagaagtcccagtgacttgttccatggcacacggcggtggctgaactcagcagggagtgaagctccttttcagaagggctctctagtcatccttcatatgaaaagttacccgtttggaatgtgtacccactgggtttgactcaggtatttagctaatgaattggacattcaggggactttggactttctgaatggttagagaaatttagaaaacaaatgaatttagctttcacttcatcagttccactttaaggaaattacaggcatcatcacagtacaatgcaaagagcaagtaagttacagtaaaggttataggaccagaatttagcaagcgcctatgaggttaaaccgcaggctcaggttcgtagaaacctctgaactcctttcatgatatgagctagccatcccgtgttgttgctgcttccaattatgacacgaagaattgagctggagcccaaggagacctgcctcaccgcgttgtgcctgtttgtcacatgccgacctccgtagtgtgtttgcggtgctgagcgtctttgtggttaattgaactgtccaaaaacttgggccttctaaggcttcttcacctctctcctgagctgctgttgaggctgattgttgaaaggaggttgttccctcctgctctctggtggccggaggttactaaccagcgggcagtctggtatttttccaccacgacatcactgctttgacacttatgctgtactgcaggctgaagactgaaatgtttattttctatgtagttgcttcccaaggctaatagaacgaggacttcgattttatgaactttagtgtggagtcattgtgtcaaggtcaattaggagatttatgttatgtacaagttctaattcaacttgtttcaggcaaattcaaaagaagttcttcattagtttttggctggtgttatagaccagtcatttgactttagacagaaaacattattcattgattctgtatcttcactataattccctatcataaaaataatgcctgtggctattgagagcaaaactcttttcttaaagtaatacttttcctttacagggcaatataaatacccctaatgcttatatgagtcagctttagtaactgggtgcagtgcctcacgcattttagtaggaattctgtggtacatcagcttcaacttgttcccgtttatgcagagtaaaacacatgtatttaagtggtttttaaaaacatattgctcagtagtgcagagtgttttacgaccctgccagtgttttccattttctcagcaacctccagaagttgagtgcagggggatagtgctggccggtgtgtctgggtttcgtggggttggtttgtgtttgcacaggtttcactgctgtgtttcttcttccagtgcgaagtgccagagggtggactggtccccaaatctctgtaccggactgcagaggagctggagaacgaagacctgaagctctggactgagaccatctaccagtctgcaagcgtcttcaaaggagccccacatgaggtacgtcctccgccttcctgcacctgggccggcccttcctccgcagagggcctggccctcgcagggcttcctggcagcctttcattcagaacagtccactcgtttttctgctctttgtctttaggcttttgttgacactcgatatttagtttcagtaaatgtcaacgtcgaagaatgggtctctctcagaatagaaactagctgtgcttgatcagagtgcctggaaaggaaattggatctcttgacctccattttactaaagccaccaaacacagagataggaatagctaatctttccttgttggagcacttaactcctgaatttagtttatttcatggttatattgaacaagtttcatgtgctactttttctttttttttttctagacagagttttgctctgttgcccaggctggagtacactggcatgatctcaactcactgcaacctccgccttatgggttcaagcaattctcctgcctcagcctcccaagtagctgggattacaggcacccgccaccacgcctggctaatttttgtatttttagtaaaggtggggtttcaccatgttggccaggctggtctcgaacacctgacctcaggtgatccacctgccttggcctcccaaagtgctgggattacaggtgtgagccactgtacctggcccgtttgctactttttcttggctgggttttggttatttatagatatcttggggattttccgatttctgtaagtctaatggagcaaggagggtgttcctgtattccttttttgctgtcacttttggtagagaagcaagggcgttccgtgttcctgtgcatgccatatgtctgtcctgtagcatcacgagtgacctgaagcaggaggggcctgcagcggaatctcccttctcagctaggacaaggttcgtggcccagagttgttggagaggatggtggcactctgtgcagagcaggtgtcagtgaggatgtggtgctggcttgggcaatggtgctggccgggagctgactgcggcctgcttcctgccgtggtggcacctgggtcagccatctgccagtggcttctgctggggtgtcttcctgagtggctcacctggtgcttgcagggcaggtggataagggaatgctgttgccatggtttgaacaagcagagacagatttggtgtgccttacttgtagatacatacatagaggaatctcagatttcataacgtcttgaggattgtctgtattcatttcttaccgggagggcaggctccagggaccgagtccttgttccttgtttgttaggcactatcgctcttgtccatgtttcaagaacttggggtgcagtgtgtttcgtgtgaatcgggggcatctgtagacatccacatggtaaaaacctccgttctgctttgggtattaaataaagcacagatccgagatggcaacaaactgaaaggaaggctgaagcggaggcccccactgtgaatgcaggaaagaggttccgtcagcacagggggccgaggcctcaggatggagctgcctggggagccactttgctgaagagggggccgtgccacgtggtgccgcctgctgttcttagacaggacccttgtacctcactgaatctgctgtggaaggacattctgaagtggcgtttcagtggtgaggtggcagtggtgggattaaaggggcccggctcgtagagcagccacgcgctgaagggcacagcagacagcgtgcatgggctgagaggggccgtgggcctggctctgctgcttccttaggtggagttttcagtgactgcagaactctgcacagctgcttttcattctcacgtccgcccccgcccaatctttgaaactaactttgattattccctcctgggtagctctgtcggtgctgtgtaagtttggttttcaattggttctcagcacccagggggtgaccacctcaaccccatctctactatgccaggggctcatcccgctcacccagcctcgccactgttctctcgtgtgagcctcacacggcaggcccggttccatgcccctgcttcccccttgctgggaacgctgtcctcaggctcccctgcctgctctttctttagctttcaccttctccagggccttctgttctgtccagcccagggcagtcctctgaaccactcatgtacgagctcacagtgtttggtgtttctaagacctggcctcttagagtgtgtgtgaagatggtgtatgggagatcttggacctctaggtgcaggtcacaaagaacacagagcttggtgcatgacatgtagcaggatccagcggttgaatggatggtggtgtgtgactctggggaaagagatccgtccatacgcattcagcgtttccctccccagcttcagcacctgcaccctggatcccctggagagcacgatgcgctcgcagcatgccggcctggtgctcgtggatcgtggctgcctaacgctgcctctttttcagattctcattcagattgtggatgcctcgtcagtcatcacttgggatttcgacgtgtgcaaaggggacattgtgtttaacatctatcactccaagaggtcgccacaaccacccaaaaaggactccctgggagcccacagcatcacctctccgggtgggaacaatgtgcagctcatagacaaagtctggcagctgggccgcgactacagcatggtggagtcgcctctgatctgcaaagaaggagaaagcgtgcaggtaaaatcacacacaggtcaaatcgcgcatccgtgactccacacggccaggtgattctgtcttgagtagactctttgcttcgctccttgagcagccctgtgtagcttttgaggccctgcttgtggaggagcagcttgcctggaggagcaggaagccaagtgggtctcgtaggaaggagttcaggcctcgcagtggttttggacagaatctgcgacttttcccaaaagcagcctgtgacaggaagggaaggcatcgcacgcacgggcccagctgggcttcataggatttttcccccccgcctcatttcaccgggttgtgtttgtctttttcaaaggaaaatcaccctaaatagaagtaagagggacaagtacttagagaactattagctctcattaccaaaccttctaatttgtttcaaatgctttcagttcccttttcacattgtggctggttattttgggtgcctgtgctcacagtagcctcggggcgggggcattgcttctggccttcataatagatgcatcgttttgctgcctttacagttttcaggggtaaggcttgtcagtgtttcagtggtcttagaggcagagtaaaagaatcctttgtccattttaaaaacaatgaacagctaagctgtgttaaccagtcatgaatttcggagagaatggagaaggagctttccacggattgacggctcactttagggtgacgtgccttcagccccgaacatgctggatgattggcagcatgtcagagaaagtgaggccaggtccagggaagctgtgctgagccctccctccagcatgggtgccaccagcctgccaggctcctgcctccgtaggtggggtgggctgggcaggcctcgtgagggccacggacatggagcttgtccctccgggcttcccagcacccgggagtgaccacactcagtagagggaaggacattgtcaaacctgctgctgaagcaaaatagcaggttctgaatcccattgagatagtttccgtagctacatgaaatcctaaagacagtccccttggcgcttgtcaggcctgtggtaggccaggggtcggaagcgagtcgccctcagctgccactgccctacttgttctagggttcccatgtgaccaggtggccgggcttctacatcctgcagtggaaattccacagcatgcctgcgtgcgccgccagcagccttccccgggtggacgacgtgcttgcgtccctgcaggtctcttcgcacaagtgtaaagtgatgtactacaccgaggtgatcggctcggaggatttcaggtgcggccaccctcgccacagcaggtgctgcggacagctgggcatggttggagggagcctgcagtcccacgccgtgtgcaggatcagcagtggcggcgggtgtcaggaatgcttggagggccaggagggagtggctttggggtcatttgttggcacggtgactccctgcctgtctgcagagggagagtgtcggagacagagccgactgactgcctttgctttagctcacactgccgtctgcgtgcaggctgtgggaagccggtccccctggtgggttactcatgtccatcccccgtttgcaagcactgatggggatgagaagtgagcagagaacagggtgggccacgaagtccagcaggcagtgtgggccggcgggtggttggcagggtggtcctcacgcctcgcccctccctgtgccattacagaggttccatgacgagcctggagtccagccacagcggcttctcccagctgagtgccgccaccacctcctccagccagtcccactccagctccatgatctccaggtagtgccgcgctgcctgcacctagtgtgcagaggggacggccgcccctcctcggacagccagctgcacccgcccacccagcggcgacattgtacagactcctctcacctctagatagcaaatagctctcagatggtaaacgtagtcgtttgatcccaaaactaccttggcaggtagttttaactctgatcctaacttaactcaatagccatagattttgtatacgttgtgcacaaaatccaaccagagcgcaagggctctcttgaaagaaaagtagtttctgtaccaattaaaggattgacgtggtctcagatattgatgcaaaaaatttttccaacgaactccgcattgtccattagtgaatgaattcctgtgacatcctccagagatggcccctcctcacctgggacggaagctgccagctcgcttcccccaagctgcctcatggcccgcacgccgcctcacggcccccatgcttcccgccagtcaagatggtctgtggacttagggccagcccttgaggtccttatcctctgaggattcagaggttgcctgcggagtaccttgtcccagggccagacacacccacaccacccactgtcctgcagtggggccgggggctcaggaggggctctcagggactcctggtgactccaggaaaatgctgccatcgttaaacattactttctctttcctccttttcaaatctttttgatactttttagagcaggatttttctgtatgtgaacttgggtgggggggttcttcccgtttccttccgtgcgtcgcccctctcacctgcagtcagctcccagcccagtgtaggccatctcctctgtgccctctggtggctcattgtcctcagagcccagacagttccagccactaggaggccgtcttggaaccagcaagtcgcatttgccacttgacactgtccatggggttttattagtagctaagcagcagctctcgcatccacttcagggtggcgtgtggcatgtaggagtcctgcttctttgtacatgggaattgtggactcatgcgtgtgtgtgtgtgcatgtgctgtgtgtgtgcatgtgtgcatgacggtgggggtgctggggggacggggtgagtggaaacttagtttgagtaatgaaggaatcttcacagaagcaaatcagaatatgggatttgtttgccttttacattttgtttaattcctgattttaaagcctgctctatctggtacaggcccttattttttcagctttttatgggaaaagcaggttatttgagaatctgtccagaagttgcataggggatggcctccacgataaggacatgcaacacgtgtttctgtgtgcagcagaggccgtgtttttcatgccaaaccccacgcggctgtcaactgtgtgcgtggtaggcatggagatcctggttgtgccgtctcagctccgctctgaaggcactgtgtgggtgctgcgtgactggagagctgtgtggaggccatgtgtgccccgtgcagggatcaggagggcgggggagggaccgagcagccctcttgcccggtcgggtcagccctagtggctgcctgcacactgtagacgtcccagggcctgtgctgtgatcacctgcctttggaccacatttgtgtttgctcttagagatcgagctcctcagtggtacctgaagcctttgcttccggaaagcgcggtagggttcgtaggtagggctagtaggtagggttagtaggtagggctagtaggtagggctagtaggtagggttcgtaggtagggttcgtaggtagggctggtaggtagggttagtaggtagggctagtaggtagggttagtaggtagggttcgtaggtagggttcgtaggtagggttcgtaggtagggctagtaggtagggttagtaggtagggttcgtaggtagggttcgtaggtagggttaggtagggttcgtaggtagggttagtaggtagggctagtaggtagggttcgtaggtagggttcgtaggtagggctagtaggtagggttagtaggtagggctagtaggtagggctagtaggtagggttagtaggtagggctagtaggtagggttcgtaggtagggttagtaggtagggctagtaggtagggttcgtaggtagggttcgtaggtagggctagtaggtagggttagtaggtagggctagtaggtagggctagtaggtagggttcgtaggtagggttcgtaggtagggttcgtaggtagggttcgtaggtagggttagtaggtagggttcgtaggtagggctagtaggtagggctagtaggtagggctagtaggtagggttagtaggtagggctagtaggtagggctagtaggtagggctagtaggtagggctagtaggtagggttcgtaggtagggttcgtaggtagggttcgtaggtagggttagtagcgcgtctgtgctgcttccacctggtgcttcctgttcccaaatcacaagggcctgaaggtggtccctgctttctctttctctttctctgtgtctcagatggcgattttgctgacagctgccaagaaaatgcttcactcaacagtcctcatgtgcccagagatgtttatagaactgtttgaattgcagccatcccctgccccctcccaggctgaagatctgttctttttaagttgattcgggagtggcattcttttatacccaaagactgtagtgcatcttgaagagctcaaagcacatgaccgcacaaatgcttacagggtttcctcccgagtaatccaatctcactccccttgtaagggaattctggggcagctatggtttgagtatgcagtttgcatcgtgtttctacctttagtaccttgccactcttttaaaacgctgctgtcatttcccatttcttagtactaatgattctttgattctccctctattatgtcttaattcactttccttcctaaatttgttatttgcatatcaaattctgtaaatgttttgtaaacatattacctcacttggtaatacaatactgatagtctttaaaagatttttttattgttatcaataataaatgtgaactatttaaagaaaa

SEQ ID NO: 11 - DNA, 15057 bp, Homo sapiens
acatccggcatgcgccgtgctcgctcacagaactacactttccaactctccccacacgacccgtgacactctgtggaccgcgagcacggagcagggtttctacagctgctccccactttctcggacccggtcctggacccagcccccgactccgacacggctccaccatggaggaggcggaccgaatcctcatccattcgctgcgccaggccggcacgtaaggacagagcccccgcccacccccgaagcccacatccgggactctaaagcccaggaccccgtttcccgggaaccttaaaacccgggatcctgacattcagggctccaactccaggatcctaagaccctcacccccttacacacacacacacacacacacacacacacacacacacgcacacacacaccgccctccctgacaccgacatcagaggcctcccaaatcctttaaccatgatatttggtacacccaaagctctgggacccagacaccttgagacgttacaaccttgaaacctcaagacccggaaccctgtaatctggggaatcttaacatcagttccctgagaccctgttatctggagaccctaagacacctgtgccctaagaaccagggagcgtaaaaccccaggaccctggcactcggggactccaaaaaatccctggaccagatacttgggatccttcaaactccagttccccaaacacctggggcttaaaaaaacccaggattcttttttttttttttccttttccgagatggagtctcgctctgtcgcctaggctggagtgcagtggggtgatctcagctcactgcagcctccgcctcccaggttcaagtgattctcctgcctcagcctcccaagtagctggtattacagccgtgcgccaccttgcccggctaatttttgtatttttagcagagacagggtttcaccatgttggtcaggctggtctccaactcctgacctcaagtgatctgcccgcctccgcctcccaaagtgctgggattacaggtgtgagccaccacgcccagccaaaaaaacccagaattctaaaatctgacatcagcatttggtcaccctgacgcacgaagactcctccgttcagaggccctaaaaacccaggatgccaacatctagggagtctgatttttgtattgcttgaaactaggtggtcttgatattcagggatcttgatacccagggaccctgacatttggaacttctgaaaacagcagcctcctaaaatctagtcttctcaaaactctagcagctcaatatgtatgcaaagaacatactatctgggaaccaagaaacccagagattgtgccacctggaccctttcaccttcccagactcccaaattttgatatttttctaaactgagttctcttccacccaccattctcctactccaagatcttaggacttgaggatttccctagttcctggttttccaaatggaagtcacagtcaccaacatccaggatctgtctgaactgtaggcatcctccctgccccgaccctggtactagtgtttccaaaaggctgcagggctcagcctgatccctgttgcctgactattcctgcgatcaagctggtccccttcttcagggcagttcctccagatgtgcagaccttgcgcgccttcaccactgagctggttgtagaggctgtggtccgctgcctgcgtgtgatcaaccctgcggtgggctctggcctcagccctctgctgcctcttgccatgtctgcccggttccgcctggccatgagcctggctcaggcctgcatggtgagtggccctcctcctaatgcacacatcctctttcttcctcttttacaaagtaaccaagttcctttgcaacacttgcctttcctctgcaacacttgcctttcctctgcaacacttgcctttcctctgtcatttttcctgcggcttagttttcattagtggttaaggctgctgactgtactgccaaactgcctgagtagtttagatcctagccccaccacttggtaactgtgtgaccctaacccttctgggccccagttttcctatttgtgaaatggagatgataaatgtagtgcttttatgaggagcaaatgagtttatccagtttgcacctgggctgctcctggcttctatgttttaaatttagctgcaaaataccacccccaccccatagtatccatttcctagttccagaaaatactctgtctgggtcatatactcctaaactaatcactctgtgctctgattggcccagtctggatgacatggtcattccttttttttttttttttttgagatggagtctcactttgtcgcccaagctggagtgcagtggtgcgatcttggctcactgcaacctctgcctcccgggttcaagcaattctcctgcctcagcctcccgagtagctgggactacaggcgtgtgccaccacacccaactaattttcatgtttttagtagagacggggtttcaccatgttggccaggatggttttaatctcttgacctcatgatccacctgccttggcctcccaaagtgctgggattacaggagtgagccaccgtgcccagccttttcttttctttttttcttttttttttttttttgatgtgaagtctctctctgtcacccaagctggaatgcagtggcgtgatctcagctcacggctcactgcaacctctgtctcctgggttcaagtgattctcctgcctcagcctcccgagtagctgggactacaggcatgcaccaccatgctcagttaatttttgtatttttagtacagacggggtttcactatgttggctaggctggtcttgaactcctgacctcgtgatctgcccacctcggcctcccaaagtgctgagattacaggcgtgagccactgcgcccggccgacacggtcattcctataggacactgtgattagccactccttcaggatcctgtggagttgggataaggatgattacccaaagaaaggcatgctggttacccaaaagagtgtctgctatattacctctgtgggaaccacatatcctgcctctgctaagagcaattccaacaatgtctctgtgacagaataaataaagtgcttttcttttaaaaaatattttaatttttttagaggtaagtgtcttgctatattgcccaggctggtcttgaactcctggcctcaagagattctcctgcctctgcctcactagtagctaggactataggcacatgccaccctgcccgagaatttttaaatttttcgtagagacggggtctcgcttttgtagagatgttgcccaggctggtcttaagctcctggcctcaagcaatcttcctgccttggcctcctgagtagttgggactacaggcgtgcaccactgtgcctggtaaagagccattctgatgaaacactcacccattcccagtatagagctgagtccaggagtccagttcctgtattcaagagctgcaagtaatgccactccccctggctcactcactctgtgactttgggccagtcttttttttttttgaagcccaggctggagtgcagtggcacaatctcggcttactgcaacctcctccgcctcctgggttccagcaattctcctgcctcagcctgccgagtggctgggattacaggtgtctgccactgtgcccggctaatttttttgtatttttagtggagacagggtttcaccatcttggccaggctggtctcgaactcctgaccttgtgatccacccacctcagcctcccaaagtgttgggattacaggtgtgagccaccgcgtctggctctcttaacctttttgaggctaagtttccacatgtgtaaaatgggtataagaattgtagctactgtatagggttgctgtgaggattaaacatgagttaatgtgtgaaaagctggttataataagctttgcataaatgggattactattattggataggtccgatctggaacctgtgaatacatagtgaatggaaacactttgaactgacccaggaagtatatggtggtggagggacgatagagtaactaccgtgaaaactttcatttagatataggggactgggtggctagagttgttaaatttgggccttgcttatgcagtctctgtctcttagcaacaggtctcagagctccatccatcccttcgctctcaggttcacccagctctcaggagttgtcacattgttctctctggggctcttggtggccttatgaggcaggcagtctgtcccctggcccaggactgtatgtattcttaaggttagcacttaataggggggaagttatgtcttctgtttgcagaggagagtacacagcaggaggtgttgaggtgggggctcaggcttcctgcagttctctgttcttccctcagtgctgtctctcttggattttgttcacctgcttttgcttacattgattttagtgggggttagtgactatggcttttccagtggccaggaggtacatgtgggctgggcacgttggctcttgcatgtaatcccagcactttgggagtctgaggtgggaggatcagttgagcccaggagctcgagatcagcctgggcaacatagtgagacccccatctctacaaaaaataaaaaaaaaatagctgggcatggtggcacacgcctgtggtcccagctatgtgggaggctgaggtaggaggattgcttgagcctgggaggtccaggctgcagtgggctgtgattgcgccactgcactctagcttgggaaacagagtgaaaccccatctccaaaaaaaaaaaaaaaaaaaagactggggacggtggctcctgtaattccagcactttgggaggtggaggcgggcagatctcaccagaggtcaggagtttgagaccagcctggccaacctggcgaaaccctgtctctactaaaaatacaaaaattagcctggtgtggtggtgtgtgcctgtaatcccagctactcaggaggctgaggcaggagaatcgcttgaacccaggaggcggaggttccagtgagtcgagattgcaccactgcactccagcctgagcgacagagcaagactcttgtttccaaaaaaataaaaaacaggtacatatggttgtctggcccccagcagccttggtttatcagcagcaggcaaaaggagttctcttaatccagctgtgtgctgtccctgtagcccccccgcaactcagcactgccatgttctggcatcttttcttcatatgccctgctcctggcaacagtttctgcaccttagccacctccatattttggcaccttccccactcctggaatgagtttctatatcagtcacagctctttgattgcatattgtggaaaaaatccaaagtaaaataccttaaaagccagtggttatacttatttgaccttgagcctccaaaataaatatatcttgcattgtgacccagtatactcctaagtatagaataatgatggcttctaagtgtactctgtgccaggccctgtggtaagtaacatggtgttaactcatttaattctcaggacaaccttctgctatatgtactgttggtataccctctttcagatgaagaaagtgaagcacagagggattaagtgatctgcctgaggtcgtatagttggtaagaggcaaagcttgggtttgaatccaggaagtctgctttcagagtctatgcagttccaaagcagtggcaactctggaagaaaaaggctttcctaggccgggtgtggtgattcccacctgtaatcccagcactttgggtggctgaggtgggcagattgcttgagcccaggagtttgagaccagcctggccaacatggtgtagccctgtctacactgaaaatacaaaaattagccgggtgtggtggcatgcacctgtaatcccagctactcgggaggctgcgtgggaggatcacttgagcccaggaggcagaggttccagtgagccaagatcacgctactgcactccagcctgagcgacagagcgagaccctgtctcaaaaaaaaaaaaaaaaaaaaaggaaaaaggctttctttctctcctggcctgtttcctcagtccccatcagaaccctcatgagtccttttgttctgagctattgtgcttctggtctttttgtcctgtttatttttaggcactctttctataataggtagatttgctctttacctatgatatgggctccaaatattttttcccaacttgtcattaacttttgactttgcttattctattttctttaaatattttctttcttttcatgtattcaaaagtacccatcttttcttttatggcctctggattttgagtcatagaaaggccagagctttaatcttgtttcttgttctctgtagcgttgactatcatcactctgtgactccccccagggcccagaggccttggggagctgggggaggttgggagggtggtggttagtgagaaagtgggagcgttttcagcctaggcccaagtctcccagggcaggaggaccctgcctgcttcctgatagccgcccaccaaccctcaggacctgggctatcccttggagcttggctatcagaacttcctctaccccagtgagcctgacctccgagacctgcttctcttcttggctgagcgtctgcccaccgatgcctctgaggatgcagaccagcctgcaggtactgggtgtctggggtgtgggcgggggcggtgaggggagaggagggccttctaggggctgtagggctgagagaggtagaggtggtaaaaaggttgatgggtaggggtggcggtatgtgccttcaggagagctaggcaggaggattaggcatcagagaggggctacagggcagggggcagggggctgaggttgagctgaccccggtggtgcgttggtgcggggaggggcctccctgactcaacccctgtgccctccctctctctcacttcgctctaaccacttgggcctcctgggtgctactcaaacataccccagtacactcccgcctctgcacctttgtatcgttggttacctttcccctaggtaccctcatggttcactcccttacctctttgaggttaacctcctctccgcagccctctcctgatccccacctggctgcagtctggatggtattcaggatcctattcatgatctctctcctctgctagcttgccggctccctgagggcagggacctttatccagtttgttccacgaagtagccctagtgtctagaacagcgacctgtacatagtaggtgctcggtgtttgttgaatgactgaacgtgagaacgcaagctggatagatgtgtatctctggatgggggtcaggagtggaggctggtctcctagggtatgcccttttggatttgcagcattgacatctgattcacttcctccctatcccccataggtgactcagctattctcctccgggccattgggagccaaattcgggaccagctggcactgccttgggtcccgccccaccttcgcactcccaagctgcagcacctccaggtgagacccctgactcccatggatcttctcttgtccccgtctgggtgcccagggttttggccccctacccctggcaaccctcatcccacttcaccctggagattctgagcctgctctcccaccagggctcggccctccagaagcctttccatgccagcaggctggtcgtgccagaattgagttccagaggtggtgagcatgaggctgtggggaggggtgaggaggaaggtgggggggaacctcatagcgttgccatgcggcagggccagctgactctgttcctgcctccagagccacgggagttccaggcgagtcccctgctgcttccagtccctacccaggtgcctcagcctgttggaagggtggcctcgctcctcgaacaccatgccctgcagctctgccagcagacgggccgggaccggccaggggatgaggactgggtccaccggacatcccgcctcccaccccaggtacagccagatgcctggctccctgctgtctgggctgctgctcactgacactcccgctggtcctctgctctccttccccactttgtccctcccttccattgtttcccctctgtgtgtgcttacctagctccccacctgaaagaacactggagtcagaaaaaaggagaacctgggacaagtcagtatccctcctcagagccttggtttcctgtgctaaaatttggggtagtaatagtgctctcctctcagggcagtagttagactgaataatgtgcttgagattcctggcaactggagcaatccagattggctacctgccttcatcattcattaattcattcattcatttggagtcttgctctgtcacccaggctggagtgcagtggcgtgatctcagcacactgcaacctccatctcccgggttcaagcgattctcctgcctcagcctcccaagtagctgggattacaggcttgcaccaccacacctggctaatttttatatttttagtagagacagggttttgccatgttggctaggctggtctcgaattcctgacctcaggtgatctgcccaccttggcctcccaaagtgttgggattacaggcatgagccaccgcacccggccctaatctttctctgtttctgcacttgtcactgatgttcatttttctggtttctaggtttttgcacaatttctgcctgtccccattattctagttctgtgtttttgctgctcctctttcttacctctctgtctcctcatttctgtactgaattcctctcttgctctgtctatctatctgttcccccttctcctctgtctacttctttatctgtcccctcttcttctctgtgcacctttttatctgtgtccccttctgctctgtccacctctgtatctctccccttccttgctgtccacctatatatctgtcacccctctgcctctgtttacttcttaatctctctcctcttcctctctgtccacctctgtatctgttgccccttccctctgtccccttatctctcccttcttcctctctgtccacctctgtatttgtccctcctccccttctgtccatctctttatctgtcctctcttcttctttttttttgagacggtgtctcgctctgtcacccaggctggactacaatggcatgatcagggctcaaggcagcctcaaattcccgggctcaagcaatcttcccacctcaggcatctgagtagctgggtctacaggtgcgtgcgcccggctaatttttgtattttttgtagagatggggttttgccatgttgaccaggctggtctcgaactcctgacctgaagcaatccacccaccttggccttccaaagtgctgggattacaggcatgagccaccatgccgagccccctcttcttctctgtcaacctctttgtcccctcttcttctctatccatctctgtatctgtcccctcttcccctctgtccacttatctgtcccctcttcctctgtccacctctgcatctgtcccctccttctctctgtccacctctctgtcacccctctccctctgtccatttctttatctgtccccttttcctctctgtccacttctctttttccctccctccattctgctctcctatttctgttccctcttcctctgtgttcacccaggtatcagtacccctccccttctgtccacctttatatctgtcccctcttcctctctgtccacctctgtatttggcccccctccccttctgtctgcctctttatctgtctcctcttcctctgtgtccacatctctgtctgcccctctttttctccacctctgtgtcggccccctcctggtctgtccacttttttatctgtcctctctttctgtcttcacctctgtgtctttttacatttttatttttttatcattattattattttttgagatggagtctcgctctgtcacccaggctggagtacagtggtacgatctcagctcactgcaacctctgcctcctgggttcaagtgattctcctgcctcagcctcccacatagctaggactacaggcatgcaccaccacgcccagctaatttttgtatttttagtagagacagggtttcaccatgttggccaggatggtctcgatctcttgacctcatgatccatctgcctcggcctcccaaagtgttgtgattacaggcgtgagccaccacgcctggctgtctgtctttgtttttatatctgtagtaattttcaaacataaatgtagagagaatattctagtgaatcctatgtaccattttgccaacttttcttcatcttttctctcccaactttttctttgttgctgtattattttaaagcaaatctcagacatcatgtcatttcagctctaaatacttaggactacatctcttaactcataaggacattcagttttcaaggtaaccactggaccattttcatggctaatgaagttaacaataatatcttgtgggtttttttttgttttgttttgttttgttttttttttgtttttttttgttttgtttttgagacggagtctctctctgttgcccaggctggagtgcaatggcgtgatgtcgcttcactgcaacctccacttcctgggttcaagccattctcctgcctcagcccccaagtagctggaattacaggagcacactaagttttgtatttttagtagagtcggggttttaccatgttggccaggctggtcttgatctcctgacctcaggtgatctacctaccttggcctttcaaagggctaggattataggcatgagccactgtacccggccaacaatgatatcttaataccatccaatacttgagttcataatcagattttcccattatcttgaaactctgttgtccctctcttgcctctctctctctgcctctttctgtgcttggtacctttgattccctgtctctgccctgtcccccgatatcctgtctatgcttctcttggatttgggggctctaggcccacccccctctcttcccacatccttctccagcatggggatctagtgggtggagagaagtatgtctgtgagcaagaggagacccctgtcctcgaggagatcccaggctggtggagcaggagagtagagcagggcctgccttagtgggaaggctggagggtgggggtgacttgtcagtatactcttgtcagggggtccttggaggaggcagggccttgggtgctaggtgggcccctacaccttcctgcttcccccgccttttctccccaggaggacacacgggctcagcggcagcggctgcaaaagcaactgactgagcatctgcgccaaagctggggcctgcttggggcccccatacaagcccgggacctgggagaactgctgcaggcctggggtgctggggccaagactggtgctcctaagggctcccgcttcacgcactcagagaagttcaccttccatctggtgggtgcgcctgaggacatgagatgtgtggatgggcgtggcaggcttggagggtggctttttgtgtcagcaccacacctttatccacacaggttcctgtgttcccactggacaggccctcgccccactgtgggatgggtacccagaggggtcccctagcttattagggacttgactggagaaaatgtggataggtgggaaccatgcaaaggtgtgggggtgttcttggggcaacaccccctttcctcaggcagtttcctttgagcatatcttctgtcctaagatgttcactctgagggccccccatccttctcatgggcatttgaggcttgagagatggggcaggtgggtaggagctgtgacagggtcagggagatttctccacgagcaagcactctggcccgaggttgcagatggtgcctttacccacatagtcacagtctggccaccatcggtgcttcagtgggcatgcatgccgcactgggggcagttctcaggggaggctgaggctgggccacgtgaggaagggccttccctggcagccaggatgcccctcgtcactccccttaggagccccaggcccaggccactcaggtgtcagatgtgccagccacctcccggcggcctgaacaggtgagcagagtggtttggaggggggtgtcccaggcccttgcttgtctactgggcctgacaccccaaccctgactggcctgggcctcccaggtcacgtgggcagctcaggaacaggagctcgagtcccttcgggagcagctggaaggagtgaaccgcagcattgaggaggttgaggccgacatgaagaccctgggcgtcagctttgtgcaggtaaggggcggaggaggggctgcgcgttgggctaggtcagaaggagggcctcggggtgtgagggactagatggggcaagaggtgctctgtagaggtctgcacatggcagaagggttcctgggagccattagggatctgtgggcctcttgagggtggctatgagaatcaggccagggtgagggtctgtgggcatctatggggcaccgcgggtctgcatgggcaggggattgaggggtcctcggagggtctgtgggcatctgtggggtacccacgggtctgcatggacaggggattagggggtcctcggggtccttggcaccagcgtggagctgttagagaggcctgtgggggccacaggggtgtacagtcatctgtggagctccatgggggctgtggcatgtgactgggtatccaccggccaggcagagtctgagtgccggcacagcaagctcagtacagcagagcgtgagcaggccctgcgcctgaagagccgcgcggtggagctgctgcccgatgggactgccaaccttgccaagctgcaggtggggttggggctgtagctgggcggagaggggcagggtggggtggggtggggttggagggcccagcctgtgtgacatgtacccatcccccaccagcttgtggtggagaatagtgcccagcgggtcatccacttggcgggtcagtgggagaagcaccgggtcccactcctcgctgagtaccgccacctccgaaagctgcaggattgcagagaggtaagcagtggggccctgggctgtgggcgggccagggcaggctcggtccctctctagggggccatccctatgctctgctcactgtcttctgcctgtgggctcatggcagctggaatcttctcgacggctggcagagatccaagaactgcaccagagtgtccgggcggctgctgaagaggcccgcaggaaggaggaggtctataagcagctggtaaggcctgtgtgagggacctgggtagcttaggagggtggggggatggtcctggggcagtgcctgctatatccctgcctagatgtcagagctggagactctgcccagagatgtgtcccggctggcctacacccagcgcatcctggagatcgtgggcaacatccggaagcagaaggaagagatcaccaaggtacactgccagggccatggagggtgggtcatgtgggctgtcaggcatagtgtggccgcacagggacctcacaccctcaggcagagctgtccagtcacactctaacacagaatagtcacacacaatccatcccagtcacccctgacacagtgacacagtccctgtctggtacacatgaggaccctccactgctagccagcctgccccaggcaggggctcatggctgccatggtgtctgccagatcttgtctgatacgaaggagcttcagaaggaaatcaactccctatctgggaagctggaccggacgtttgcggtgactgatgagcttgtgttcaaggtgtggggcaggttgggcgggggtgagtggggtgaggctgggctgctgccttgtgcatctgctaattggctggctggggtccagacccaggccctgtgcgaggctggaggtgcactgatacccagggctggctttgtttcatggaggatgaagctagtggggtggtgggagagggtggccttcttagggcatggagatggtcaagggcagcccactgatacctttgaggtccctgtgtctggtcaggatgccaagaaggacgatgctgttcggaaggcctataagtatctagctgctctgcacgaggtgaggggagacatgtgcctggggtggggctgctgggggtgggtgggactgggtgcaagccttctgctcctgttgtccccagaactgcagccagctcatccagaccatcgaggacacaggcaccatcatgcgggaggttcgagacctcgaggagcaggtgaggcctgggggcaggatggggagccaaggcgggccggggggacagttcctcaggttatgctgacagaggctgtggagccacacacagccgatggctggacacccagccctgccccttagtgcctgtgacctgggacaggcaagtggcctactgtgagccccagcttccaccccaagggccctcctgtctgcctcccagggccatgggcagaggcttcagcttaaagatgtagggggaatcctgccacatggcgaaggatgctttgggtagagggaacaccacacgaggcctggccatgggacagagcaggctgttggagttggtgggaggggcccagagtggctgtgatgggggctggtgagcaggagctgggaaaggggctgtgtgtgctgagggggcatgtgttcacattgcctcagatcgagacagagctgggcaagaagaccctcagcaacctggagaagatccgggaggactaccgagccctccgccaggagaacgctggcctcctaggccgggtccgggaggcctgaggagccgccggcagaggtctctccccagcctcaggcagggatttggggtgctggaggcagtggccaagcacatgccctagctacttcctccgctgtccagttcctcctgctgcggccttggacccagacccctgcccactgaccgcaacccttatatggggtgatagtccagcatgtggggagctcggctgcagtttattggggacggtactgtgggttgggggccttggatcccaaataaatgagtagttcctctgcagtctaa

SEQ ID NO: 12 - DNA, 29453 bp, Homo sapiens
agactgacgtgtgagctgcatcgcgggaggcgcatggcggggatggcgctggcgcgggcctggaagcagatgtcctggttctactaccagtacctgctggtcacggcgctctacatgctggagccctgggagcggacggtgttcagtatcctgtcccggccgcgcgcgcgggggccgggctgggggcgcgggccgcggggccgcatttccccaggccccgggcctggggtggaggctggagcggcggccccgccggtcctgtgcgcggaagccgggggtgcagggggaggtctgggggccgagggcggcgctcgcggggttaagtggggggtgggggagacgagaactcttgagatccggggtcacctgtgagtcgctggacccaagggggaagcgtcttgattcctggaggaaatctccgaaggtgatgtgtaaccctgtgtgtcgcctgcacttcggccgcaactgcctttggttcagtcccctgttcctgtaggaggcggggatcatgtaacagtggagcacatcgctcccggcttggacgcctttgacctttaagtgttcctgatttagttggctttgggtctaccaagaattctagtcagttaactagcttttaagccaggttctgaatttgtaggcatgacactccagtagtttttgaaagcagtttaagttattgtatctttttggtcttcaagttggggagttttaaaagtgtatttattgcttctgtgcaccgtccgtagaagtcggcccgaaaagtggtgcaatttgtggttagttgtcggtagggtttgaaactgtgttttggtggatagttaataaattcttgttaatgactattgagtggttactataagcaaagcatttgtgcaaagcacgttgtctgtatcttaactcatctaactttgagaacttcagttaataactcagggttgtgaagataggctccctgaaagtctgatgtttcttgtctctgcttgtccatattgacatcctttgatgatattcttgcagattaaatactgataatgaatgagatgtaacttttaaaaaactcaggccaatacaaaacaggtatttcacaaaacatgtttagtttatccacgttctctccttttcagtgtggtttagttggagtagcttacttcagaataactttgcgaatgcattgttgcattccagtgagtgactgaggtaatttcattctaagccttatcaagtgtgtttatttgttttgagatagcttaaggttgtactcaaagctgagtcttttgtttaagcacttttgaggaatttgagatgctttcaaagcagtttatttatttattactgttggcatttctttccaaacctggaatttaagaaccagaatgcatattttggatttagactctgaatatagtttgctttgatttcctgcaccatttatttgtagctgcagtttagtctcactctttagggctcgcaaggtcatgccttgtaaaatatatacttgaatgcatatttaatagaagtctctcagtagaagcaagtatatcttgactgacataacacatcctaaaattaatttaaacaatgctgggttaaaatgaaactctttaaatcagaggttgaatgtagagtgcactattagaatctagtatagatttgacacctaaaatctaatatagattttacacactaaaatgctacagttatcaatgatgttaagatttttctgttatgttgcaatagtgatagtgtcctataaataactaggtgatgccttttttgggggatggagaaataaattatgaaatgaaatatagtgccttagtagatatttgcctttaatgtttttgagttaccatggtttagcgacaagtagtttcaatttttttttcaaataggtgagaactgcaaccaactgacatccaatattatagaaccttatgattttaaacttaagataaaaaaatcttatttcaaatttcacgttattgaattaactcaggttagaaatgcaattgtttgacataagccagtcttgaattactatcagctgttgtatttatatttttccacttcaacttctagaatcatttaaaactatctgatagtttggaacatcaatttgagattgaatcctcattttagcttggtggaaagaactgaatgagaaaactggatttttttccctacttgtcaggaggcttactctgaagtagtttgaatttcataaatccattaatgattagtaagcttcacccagaactaatctgtggccagctacaggcttttggaaagaggcatactttctacagcttaaacattacattcaacttaatcatcaatcctagaaacctaaaatttagagaaatttgcctctgcctgtctgaaaatttgtctctgagttagaagtcctgaacagaggaagacttcagattgatttcttttctttgtgtgtgtgtgtgtgagacagtgttttgttcttgttgcccggctggagtgtaatgtcgccatcttggctcactgcaacctccgcctcccaggttcaagcgattctcctgcctcagcctccagaatagccgggattacaggtgcctgccaccacgcctggctaatttttgtatttttagtagagatggggtttcgccatgttggccaggctggtctcgaactcctgacctcaagtgatctgcccactgcagcctcccaaaatgctgggattacaggcatgagctaccacgcctggccagattaattttcttctttttctttttctttttttttttttgagacggtgtctcgctctgttgccgaggctggagtgtggtggtgcaatcttggctcactgcaactttgcatcccggattcaagcgattctcctgcctcagccttctgaggtagctgggattacaggtgcccaccaccacgcccagctaatttttgtatttttaatagaggcggagttgggggtggggtgggggtggggtggttttaccatgttggccagtctggtctcaaactcctgacctcaagtgatccgcctgccttggcctcccaaaagtgctgggattacaggtgtgagccaccgcgcctggcccagattaatttcttaaagaggatagatgcattagtttacatttcctgctatataatgcatttttaaaaatttgaagttgtgggccgagtgtggtggtggacgcctgaaatcccactagtcgggaggctgaggcaggagaatcgcttgaacccgggaggcggaggttgcagtgagccgagatcacgccactgcactctagcctcagtgacagagtgagactccgtctcaaaaaaaaaaaaaaaaaagttgtaatttcaggggaaattgataacgtactatcactgtactttccaggggcatccttgagcatctgaatggatgtttagaaattatttgcttcttgacttcccaagtcaaatagctagaagttagttaaaagctgttgtaaattgaaagtcaatcttggccgggcgcggtggcggttcaccagtctggccaacatggtgaaaccccatctctaccaaaaaaaaaaaaaaaaaaaaaaaattagctgagtgtggtggcgcacgactgtagtcccagctactcgggaggctgaggcaggagaatcgcttgaacccaggaggcaaaggttgcagtgagccgagatcgtgccactgcactccagcctgggccacagagcaagactccatctcaaaaaaaaaaataaaaagaaagtcgatcttaggcctggcgcggtagctcacacctgtaatcccagcactctgggaggccgcggtgggcagatagctggagtccaggaatgtgagaccagcctagaaaacatggtgaaactcagtctgtactaaaaatgcaaatattagccgggtgtagtagtgtacgccagctactttggtggctgaggcaccagaatctcttgaacctgggaggcagaggttgcagtgagctgagatggcgccactgcactccagcctaggtgacagcctgttcaaaagaaaaaaaaatctcaattgaatataagtatttttgaacttacctatgtaaggaaattgcaatttgtaaaaaagattttaagatgtgtttttaaggaaaagcatctattgggtcaagtcagacacattgtgaatagttcttgaaacagtaagatttataagtaagttttgtaaattcttcctcactagggcctatataccatctgtcttttcttttcttttctttgtttttttttttttttttttccgagacagtcttgctctgtcacccaggctggagtgcagtggtgcgatctcggttcactgcagcctctgcctctgggattcaggcgattctcctgcctcagcctcccaagtagctgggactacaggccgtgccaccatgcccagctaaatttttgtatttttagttgaggtggggtttcaccatgttagccaggctgatcttgaactcctgacctcaagtgatccccccacttcagcttcccgaagtgctgggattgattataagcatgagccaagatgcctgggctaccatctgtcttctgatgagacatttgaagtgatacattggcttttggtttgtcaaggaatatttgaactttttccatgtgcagacatgtttctatcttacagagaaatgggacatgacacctgcattaagacaaaaggtaacaataaagaagaatctgataagtgccaattagtattacagtatatactacaaaaggagacctaccatagactgagaaccactgaccttatctcaggaggagacatttttaacatacctttcaaaagtatcctttccctactggcatcccaaggtgggaaagaaaagaccaggttttgtaaccaagataggcttttgtaacagtgagacacgccctgaagtacctcacttggataacgttgtaaccattcctgttgagagttgagaaaattaaaaatagattgttaaaataatttgaatcaactttgggaggctgaggtggctggatcacctgaggtcaagagttcaaggccagctcggccagcatggtgaattcttgtctctactaaaaataaaaaattagtggggcatggtggctggcgcctgtagtcccagctacatgggaggctgaggcaggagaattgcttgaacctaagaagtggaggttgcagtgagccaagattgtgccattgtactccagcctgggcaacagagcaaatgctccgtctcaaaataataataataataatagtaataataataataataataataatttgaatcagaagtgtgctattttaatcttttttcttttctttttttttttgagatggagtctcgctgtgttgcccaggctggagtgcagtggcgcgatcttggctcgctgcaacctctgcctcctggattcaagcaattgttccgccttgccctcccgagtagctgggactacaggtgtgtgccaccacgcccggctaatttttatattttttagtagagacaagatttcaccatgttggccaggctggtcttgaacttctgtcctcaggtgatctgcctgcctcagcctcccaaagtgctgggattacaggcatgagctaccgcgcctggcctaatcttgttttattcattaaaaaataaagtcatattagtctataatcactgggctatatttgcccatctctttgctgctgatgatgtttccatggcatgttattttcagcaaaatgtgggcagttttttggtttatgttaggaattagattcaccctgaaagacagttcatgtgtcttgaaaacatttttttcccacttttaaaccacagtgctgggcacacaaataatgcttaaaaaacagttgtttatatattgatttgttattttattttattgatttattatttttttgagatagggttttgcacttgttgcccaggctggagtgcaatgacgcgatctcagctcactgcaatctctgcctccagggttcaagtgatacttctgcctcagcctcccaagtagctgggataacaggcacccaccaccacgcctggctaattttttgtttttttagtagagacggggtttcaccatgttagccggatggtctcgatctcctgacctcgtgatccgcctgcctccgcctcccaaagtgctgggattataggtgtgagccaccgcgcccagccacacattttaagctgtatgttattttcagtagcaactaaattattttcttagatttttgctgtatcctcagatacttacaacttagaattaaaaaggactttttttttttgagatggagtcttgttctgttgcccaggctggagtacactggcatgatctcagctcactgcaacctctgcctcctgggttcaagcaatcctcattcctcagcctcctgaatagctaggattacagttgcacgccaccatgcccaggtaatttttgtatttttagtggagacggggtttcaccatgttggccaggctgttcttgaactcctgacctcacgtgatcctctcccctcagcttcccaaagtgctgggattacaggtgtgagccaccgcgcctggcctaaaaggactttttttgcatctcaatatactaattaaagtatttgggagtttggaaaatatgaattttaagttgtaaataaaatagattatacatccttatggttgaaaacacaaaagatacaaaaaggtagttggtgacacagtcttccttccacccctgcctcggccaccctgggacaaccagtgtcagcagtttcctatgcatctctcctgagatattctgtgaatatataaaaaatatactccttttttttttctttttttgagacagtttcgctcttttcctcaggctagagtgcagtggtgcgaacttggctccttgcaacctttgccttctggttgcaagcgattctcttgcatcagcctccccagtagctgggattacaggtgcccgccgccataccctgttgattttttgtatttttagtagagatggggtttcaccatgttagccagggtggtctcaaactcccaacctcgtgatccgcccacctcggcctcccaaaatgctgggattacaggtgtgagccacctagcccggctcctattttttttttttctcaagatggagtcttgatctgttacctaggctggagtgcagtggcgcaatcttgggtcactgtagcctccgcctcctgggttcaagcaattctcctgcctcagcctcacgagtagctgggattacaggtgcctgccaccacacccggctgatttttgtatttttagtagagaaggggatttactatgttggccagcctggtctcgaactcctgacctcaggtgacccacccaccttggcctcccaaagttctgggattacaggcatgagccactgcacctgtctgggaaatgaacaattgtaagattaggaagtaatgtgggagaagtgaatacatttataagggaggatgggaaggacaaccagcaaaccacaagaattctcagacagatcaagctctgggagtacggtggaagcagaccacctttaaccggattctccttaaactatcctaacctcctggaaagttgtcttgttaactccagggccctactgctttagtttgaagaaaactgctctagcctgtttaacatgttagcctttatatttggctgattcagtgagaatgttaggatatctcttaactgtactccttagaatattaactttttctttagtagtttttggttggtaaaggttgaaaataatgaaaactgtgcttaacaagaactaaatggtctataccaggacaggcagagaaagtcatggttgggttaatggcagtgggaacagaccacacattgatattctgcagcagtgtttcagcatgtgattctagtgatttgtgagtagtgatcactataggtcctgtctccattttcttaaagactttgtgattcctccagactatgagtgttgtaacatttatggcacataggagctaagatagatttttttttccccctaaaacagggtcttgctctgttgcccaggctggagttcagtggctggcatgatctttagttcactgtacccttgaactcctgggcttaagtgatcttcccgcctcagcttcccaaatagtggggactacaggcacacaccaccatgcctgattaatttttaaatttttagtagagacagggtctcactaggttgcctaggttggtcttgaactcctggcctcaagcagtcctcctgcctcagctttccaaagtgctcggattacaggtgtgaaccatcggacctggcctctttttttttttaaaagaacaaaccccaaatgctcaaatttagtaatttaagctatgtgttctagaagatgtacttgatagaggatatatactttttataaattggaatgttgaaaaaatagtagttatgatcaatagttatgagaaatagaagttttactaatacaagcgttttggtcagcatgtattatatatgtttctgaaaaactgcaaaataatatggtttataggaaaatattattgagtcagaccacttaaaatgtatgcaatttagtaagcaagcactaacaaacacaatacttggcatcttgagggaataacttggatgtcccagacaggcaggcagctcagcttcactggaagctgcccgaggggacatgaacaaagcatggacaaagttgaatggaaatgtcagcagtaggtgctgatgtaatacagacagtgtgggctgccattgaggcagtgtagggccagtgccacctgccacattggctgagagctgtgctaccctggaggtgcctttctctgaagagggagactgggtacaaatgcgaatttctgattttcttaaaatagagttaaaaggacttctgcctgtatagcagctgagttgagagatgtttcctgcagaaggtgatacagttgacccttgatccacttgggggttaggagtactgcccccaggccctcatcctcaccctgcaggcagttgaaaatctgtgtacaacttttgactccccagaaactttactaatagtctacttttgactggagccttattgataacattaacagtcgattaacatattttgtatgttatatgtattatatactgtattcttatagtaacgtaagctagagggaagaaaatcataaggaggaggaggaggggttggtcttgctgtttcaggggtggcagaggcagaagaaaatccatgtataagtagacctgcacagttcaaacccatgttttcaagggtcacctaattattttcccactaatctgctcccctaaatgatgaaatatcccatatgaaggaatatagctcctgtactgtactagtcgtatgtgagttatctgatgttacagaaacatgtactgtagcagaacagattataattcagagcagactgggaaatttttccccataacactgggacttcaaatcttcctgagggtaatagaagctcaaatcaataaatgtgtgccagagacactataaccttagtgtctctgggattagagctacaaaccatttccaggattttagtccacagtgaaaaattttcagtccgtgatcattactcatttcagcagcatgctttgttgtttgtttagttttaaaagagcttgtcatcaagttgtagtttctaaaaacaattttcatacttaggtttgtataatcagcacactatagaaagcttagagaatggattttgcttgctaaacactaatttctgatggtgatgtgctatcctttaacatgacccttgaatatcaaattggttaacatacagaggactgtgacagtataatattgtgacagtataatattttccacttgtttcaatgtaagaaaactggaaaagtatcaagagatagttgatatatctaggaaaaattaactttcttttttttttttttttttttgagattgagtctcactctgttgctcaggctggagtgcagtggcgcgatcttggctcactgcaacctccgcctcccgggttcaaattctcatgccttagcctcccgagtagctgggaatacaggtgtgcgtcactgcgtctggctaatttttgtattttttttggtctgacctcaggtgatatgcccgccccggcctcccaaagtgctggcatgggattacaggcgtgagccaccacgctaggcactttctttacatttctgttggtgatgatctgcagttttttgaggtcaaaggaaaagaaaactacagtaataaggaagctttcctgtttggggcttcattcagtagcctgcagctgctttcacttagggctttgattgcttttcagtaaacagcatatgataatacttcgtcaaatgctttgttttcttttttcattaagatgatttcttagatttatcacaactcttgagtatttctaaggttaaatagcattttagaattgatttttttttttttttttttttgaaacagagtctcgttctgtcgcccaggcaggagtgcagtggcgcgatctcactgcaagctccgcctcccgagttcacgccattctcctgcctcagcctccggagtagctgggactacaggcgcccgccaccgcgcccggctaattttttgtatttttagtagagacggggtttcaccgtgttagccaggacggtctcgatctcctgacctcgtgatctgcccaccttggcctcccaaagtgctgggattacaggtgtgagctaccgcgcccagcctagaattgattttacaaaagaaatttgattaatataggattggattgctttaaatgttgttttagctttgctttttaatgtgactatatcatttagtcacatttaatgtgatttaatgtgacttaaataattgaaattatttagactagtgaagatgtataagtcatacccactggaacaaaggtctatgaccttttcccggtgagaaactacctttaagttttccaaagtcttgtgattagattactaaagtgggtgatgatagtttagagttactgattggaacaggaaatgttagttgctatggttttgtttctaatgtactgtatttatatgtaaagcatttcctctctttattataggactttttttttttaagttgctgataatggtctttttatgggccaaaaaaaaaaaaaatctttatttctttcctagcttgctggaaacttagcttatgtttaggagattcctcttaaagaaagagaaaacaacatacagattctatatatggcttcacatctacttgcttttatgtccatggaacccataaaatatttatgttatgcccaggttatgaataacctctgattgttcattcagcccttgaacaaacatttatcttcagcacctgcacagtatcctgtcacattatttgctcaattctgggatggttcatgaagcaactgctttaccaagcaatgtactatggctggaagcaaaggctcagtaggggtgctctgtcaaacacttaaaagtcagtgtttagagacaagttataaacacaaaacagaacagcccattttttagtttttgaggttgtattctattcttgttctctattgcttgagtcatggaaccccctctagaatatagacctgattaatttgtatacagctactggcacttatgcaaacaacaagaagagttcggtaaatagaaagattactccattactttgtatattaccttccaatatatgtgtattgcataaaacggattaatttttacattttttctttgtgtacatgtgaaacagaagattgctttatggacgattgacaggtggtactgaaacgtcctcttcaaacaagtgggatcctaaaatgttaatgaaagaaaggacctcattttatgaagaaactcaggtccagagaggttgtgtcatcccaggattacactgtaaattaataacaaattagtagcaggatgaacttgggcaaacatagacagtcatgatgttaaatgctcaaaccctcaaagaacagttttaatgaggattacattgccttctcttgcagaataggttcgattctgaattctcacaaccctgaaagataggtgatgtgtgtccacattttattgataaggagactagtgttagagagcttttgacacaaacagggatggcagagttatgactcaaacctgggtctcctacagtgctgtactgtttctcctacccatttcttaaaactcacagtgtgtcaagggtactttaaattttgagaggcttgttacagaatgagatggattgagaaatctataccagatagcaaattatagccggtatactctgttatgtatatgtttagctttgtgagagcactttgaagtgtgacaataaaaccaatgcctaggtcgggtgtggtggctcacgcctataatcccagcactttgggagactgaggtgggcggatcacctgaggccaggagttcgagaccagcctggccaacatggtgaaaccccatctctactaaaaatataaaaatcagctgggcgtggtggcacgtgcctgtaattctagctactcgggagactgaggcagaagaatcacttgaacctgggaggtggaggttacagtgagccaagatcgtgccattgcactcaggcctggatacagagcaagaaattgtctcaaaaaaaaaaaaaaaaaagggaggccgggtgcagtggctcacgcctgtaatcccagcactttgggaggccgaggtgggtggatcaccaggtcaggtgatctagaaattaaaatttttgttttttttcaagacagggtatcactcagtcatccaggctagagtgcagtagtgttatttcaactcacagcaacctctgctttctgggctcaagtgatattcctgcttcatcctcccgagtatctgggactacaggcatatatcaccatgcctggctaattgtttgtttttgtagagacggggtttcactattgttgcccaggctggtcttgaactcttagtcttgaaccaaggtgatcctcccaccttggcctcccaaaatgctgggattacaggtgtgaaccaccacacctggcctgcattttttgattattagaagttcctcactgtcctgttatgtgcttgttcacttactgtgtccctgtatagctaatttattattttttaaaaaactttttatctttttagatagagtctcactctgtcatccaggctggagtacagccgtgtgatctcagctcactgtagcctcaacctcccaggctcaagtgatcctcctacctctgtctccagagtagctgggactacaggtgcgtgccaccatgcccagctaattttttaatttttttgtaaaaaatgaggttttgccatgttgcccaggctggtctcatattcttggtgttaatggtggagggtatcctggttcttggcatcttgaacaaagaattggtcaaaacgcacaaacaaagcgaggaaggaatgaagggttttattgaaaatgaaagtacactccatagtatggaagtgggcctgaacataggggctcaaaggcccggttacagaattttggcgagtttaaatatcctctagaggattccattggttacttggggtatgccctatgtaaatggagaggatgaagtaaagttacaaagtcatttacttggcctacaccctctggagaggatatttcctgttatagctgaagtgtgaatcggcctgatgttctctgcctccagaccctattttcctgcctcatctccccactttgagatgtgatccccataaatctttatgggaggcagagggaccaatgttctttttctgtaactacttcatgctgccttgaggcctagtccctacctattggggaccatggaactctcgccctgctctgtctagtgaaggtagggtagcttttttttttgagatggagtttttgctcttgttgcccaggctggagtgcagtggcatcgtcttggctcactgcaacctccacctcccgagttcaagcgattctcctgcctcagcctcccaagtagctgggattacaggttacccaccaccatgcccagctaatttttgtatttttagtagagatgggatttcaccatgttggccaggctggtcttgaactcctgacctcaagtgatctgcccacctcagcttcccaaagtgctgggattacatgcgtgaaccaccatgccctgccagcagggtagcttcttgatggccaggggtggtgtcttcacctggaattggctggaacctttgttgcatgatcatctgaagcttgatggtttctaggcgagagggaatgaatttggttaaaagatttaatgggaacttcagaggtggatacctatgctgtcagaaatgtttgttacagagatttgcagaagaaaaaacaaaaccttgtctgttctagaacccatgtgtttccctaaagtcttagcacaaacaaccccgttttggtttggtttggtctgttggggcccagtgcatgaacttagtccaaaacaatgggcttccagaattttgttgaaaaaattccccctttttgttcaggttcttacttaggtgagagtatgagcaaaacttagggccatagcaccactctcagttaccatcattttcgtttccagtctcagcacatcatttataggttaagtcctcatggttgcacatttccttcagctcttgtcattccagttgaagagcaatcatatgacattctagagatggctgcatggaagcatttaaaacctttgagagaatacagcactccagggagacgattattatgactgttgggaggataataccaagagttcggagtatgctccttacccgggtcaccataccaaaccacctaaaattatgtagattaaagaatgatctggatgaagtgtctgcttgcttgaccaaatggtctttttttttttttttttttttttttaagagatggagtctcgctctgtcacctagactggagtgccatggcacaatcttggctcactgaaacctccacctcacagatttaagcgattctcctgcctcagcctccagagtagctgggattacaggtgcctgccaccacggccggctaatttttgtatttttagtagagacgcggtttcactatgttggccaggctggtctcgaactcctgacctcaggtaatccacctgcctcggcctctcaaagtgctgtgattacaggtgtgagccactgcgcccagctgagtaagtggtcttttcattaatcccctacaactgaatttttataacctgcattctatgtatttctcgataggccacaggtgccagcagctgcacagatacatgtctgtttagccaattctattatttagcataactttcacaagagaatttaaaatctgttgtgtgatgatagcctttaaagtagaatgtgctagagagcctatcatgagggatacatttctaatcattgcttctttcactttaaaccatggaaaaagagccaaataactgatgcccttctagaagagggaaggcctcctggcaatgttctctttaacccatgatgtgggttaagaggagtgaaccagtgttttatttttgactgattatgaggcaatgtatataccattaaggtttcttacctacattgggccttcattttttatctgtcaaagtataagattacccaggtagaaggctggctgcagaccccttcataaataaaagtacactccataaatccacataacagaccccttttccacttctattgtttgtagagatgtaggcaagaaaaaaatattcaaagataagagtttcatgatagtaaagtcttaacctgtgaacttggaaaagctgttcacatcaaggatgctatcttcttgggagaaatttccctggttggctttatctcaaaggttccaatggatgcagttccagaagtgtgcagggacccctctcagttgtgagaccatgaacccaaagcccaaggtcccaaagttttgttgtagtgtggatggggaggacagtctttctctgatgttctcagaagattcaaacgataaaaagctttttttacctggtgaaaatacactgtagtgtagtaatctactgttacaacatcagccctcttgcatgggaaagcttttatacaaccagatatcagtggaatgaaatcgctttgtaaaatatttaaatggcccaccaggtgaccaaatgtacgtgaagctttaattgtcttcccagtaatatgggaccaagcattggttataaactattttaaacaattttagtatcaactggtttgatttggttatttctgtggtttacaatgacaacataataagcataattatagttgatagcgtatacttagacattagaattttagaaatcccatacaattttggaatatacattagtattattcacaaaaatgtaacctaaagaagactgaacatcgttttggcaatcccgtgtatgtaaacatgtcaaataatcctgtttacctcttttctggatgttttcagggaccctctgatacatccagagagccaggcattaggaaagacaattttgaaactgaagtttgattttggaattccagattaccatatattatacgttttgccaaaatgatgactcagaaattttattttattttatttatttatttttttgagacagagtcttgctctgtcgcccaggctggagtgcagtggtgtgatctcggttcactgcaacatctgccacccaggtttaagcaattctcctgcctcagcctcctgagtagctgggattacaggtgcatgccaccacgctcggctagtttttgtatgtttcatagacagggtttggccatgttggccaggctggtctccaactcctgacctcaggtgatccacctgctttggcctcccagagtgttgggattacaggcatgagcccctgtgcctggcctagaaattttaaagaagcaaaaacctttttattataaccttttaccaaaaagaaaaaaaaagttttttctactatttttagacaccttgcgtgtaaaactgtttttagtagtctttttaaaattttttttttagatggagcctggctctgttgcccaggctggggtgcaacggtgtgatcttggcttactgcaacctctgctcccagtttgagtgattctcatgcctcagcctcccaagtagctgggattacaggcgcccaccaccacgcctggctaacttttatagttttagctgagacggggtttcaccatgttggccaggctggtctcgaactcctgacctcagattcgccctccttgttctctcaaagtgttgggattacaggcatgagccatcgtgcctgacctgtttctggtagtcttaattgcatgttacaatgacgactcttagcaattttttttttttttgaggcagagtcttgccctgtggcccaggctggagtacaatggtgcgatctcgactcactgcaacctccacctcctgggttcaaacgattttcctgcctcagcctcccaggtagctggggttacaggtgcctgccaccacgcccagctaatttttgtattttcagtagagacagggtttcactatgttggccaggatggtcttgaactgttgacctcgggatccacccacgtcggcctcccaaagtgctgggattacaggtgtgagccaccgcgcctggcctgactcttagcagttttaactttaatgtaaaacgtggtaagttatattctgataaggtttgactgtttctagcatagctaggggtgtggccaatgctacatgtcccttggtcttacctagctggaaggcaggcaagttaaacaattttcaaaagccaaggaagcagtttatgaccttaaagcatttagcaaacctaatatttgaacataatttagaccaaatgtttacattttgaagacatttttactaataatctttaaaactgtctttatttcccaaagattgctaaagtcacatgaactaaaaggcattacactttctacttttctgacaaaatatttgatttaggctcttattattattaaaccaattaatttaaaactttacagaggagactaaccattttgcacagggagaaagcgggccagagaccagtaagaaattcttacccttttgctggcatgccaggttgctgggttctctatccctgagcggccctagcaaccctgtttgactgtatgcaaccaaacacattaccatgaattaagaatattcacaaatagtttgcaaattttggagaaattaggcagagagagagaaaaatatgactcaaattttatttatgaaagtatactcagctgggcacagtggctcatatctgtaatcccagcactttgagaggccgaggcaggtggatcccctgaggtcaggagttggagactagcctgaccaacatggtgaaaccccatctctactaaaaatacaaaaattacctgggtgtggtggcgggcacctgtaatcccagctacttggggggctgaagcaggagaatcgcttgaacctgggaggcagaggttgcagtgagctaagactgtgccattgcactccagctgggtaatgagaggaaaactccatctcaaaacacacacacacacacacacacacacacacacacacacacacaccctcccctagaagcaggagaatcgcttgaacctgggaggcagaggttgcagtgagctaagactgtgccattgcactccagctgggtaatgagaggaaaactccatctcaaaacacacacacacacacacacacacacacacacacacacactcacaccctcccctagaagcaggagaatcgcttgaacctgggaggcagaggttgcagtgagctaagactgtgccattgcactccagctgggtaatgagaggaaaactccatctcaaaacacacacacacacacacacacacacacacacacacacaccccctagaggaaaactcaatctcaaaacacacacacacacacacacacacacacacacacacacccctagaagcaggagaatcgcttgaacctgggaggcagaggttgcagtgagctaagactgccaatgcactccagctgggtaatgagaggaaaactccatctcaaaacacacacacaaacacacacacacccctagagggaaactccatctcacacacacacacacacacacacacacacccccctagacatgtatacacacacacaaaggaagatccaatagcttggaaccttagccatgagataataatacaagcttggcggttttactttgccccaagagataatccaaggaaggctgtgaaccaaaatttcgggtaaagcagtctccatgacattttgagttttaaaggccaaacctccccagactccaaggagcactggggccaaacagtagcaaaggatcgtgtcacctgttaaccagaccctctgcttagaactgcagcacaaagacctgcatacatgtaacaccattccactttcccattcaacagtaaactccagattccaaacaatgttggggccaaacagcattcattgcaactgcaagagtaaattctaaggagggcctagtattagacctcagaacctctgccaggagcatcccctttgggcaggttgaggtctgcaggacccctggagcaacctcctgtggggtccaatcttggagtgccagatgtctctgaccttaggtgggcaccggtgccacatgcagattttcccctccagagcctactatgagctttagaagaatagccataaactgtaatgagaactggatgctgggtgtgccttttccttagccagttgagtttgataaaggaaaaatttagtgtaagaaaagaagatttaattcccctgaaaaatgggtgagtttgctccaagctgcgccacatgtagggatcagggaccgtgtgcggaaaagataaagagtccacggcaactataaacagatgctgaggcctcacgaggtggctcacacctgtaatggcagcactttgggaggccgaggcggggggattgcctgaggtcaggagtttgagaccagcctggccaacatggtgaagccgcatctctactaaaaatacaaaaattagccgggcatggtggcgggcgcctgtaatcccacctactctggaggctgaggcaggagaactgcttgaacccgggaggcggaggttgcagtgagctgagattgtgccactgcactccagcctgggtgacagagtaagactgtctccaaaaacaaaaaacaaaaaaacagccgctgaaagactgaaaaagaaagaaaggaaaaaaaaaaatggaaaaagacccaggtttaagcgaactgggcggtggtggttaggcttctccacatggaaaccccttagtttcactggccatggccagaaacctgcagttgcttccatgtttaggtgctacccacatgggtcctgggtgggaaaggaaaagagagagaggagagagagagagagtcccctgtatggagcagaaaagaaaaggagaaaggagaaaaaaaaatcccaaactttaggtttacctcttcttcctggctggcttgccaaaatatgttaactgtggagggtgtccaggttcttggcgttatgaacaaagaattggtcaaaatgcataaacaaagcaaggaaggaatgaagggttttattgaaaatgaaagtacactccacaatttaggagtaggcttgagcataggggctcaaaggccctgttacagaatatttgagagtttaaataccctctagaggattccattggttccttggggtatgccgtatgtagatggagaggatgaagtaaagttacaaagtgtttacttggcctgcaccctatggggaggctatttcctgtcataactgaagtgtgaatcggccttatgttccctgcctccagaccctattttcctgcctcactggtctcaagtgatccacctgctttgagttcccaaagtgttgggattacaggcgtcaactgccttgcctggcaacattctctttttttgggagacagggtctcactctgttacccatgctggagtgtgtatacagtcttgaactctagtatcttgtattttaaccaggcaaaaaacttgttcaagttttgataagttattgtttcacttagaattaaaaaatcatgcttttataggcatgtaaaaaatttaaaagcttaacaatttaatgttcacaaaattgagcttaagtttcagattctttttttacttttttttttttgtgagatggatttttgttcttgttgcccaggcttgagtgcagtggcgccatctcggctcaccacaccctccgcctcccgggttcaagcgattctcctgcctcagcctcccaagtagctgggattacaggcatgcgccaccacacctggctaattttgtatttttagtagagatggggtttcaccatgttggccaggctggtctcgatctcccgacctcaggtgatccacccgcctcggcctcccaaagtgctgggattataggtgtaagccaccgcgcccagccaagtttcagattcttgatttatagtggaataacccgttaggctaatatatgcgtgttccttaagtgatatattctccatactaaattgaagaattagcatcataaagactatgtaacatacatattcagatagctgatttatagtaatcactcctactggagttgaaattgagccaatgaccttaagattattactataccattttcatttgtttggtatatgtatttataaggtttatataaaagctgtgaaaaagcaaaatttgttcttaagtccaatattgcctggaaactgtttttgtcttttctgtagtcattatcaagtttttcagccacaataatgtgaggaatatgtagaaagcatcataatgaatctagtcacatgaacatctctgttcatcaaatgtctatttagcatgtttttttgttagatgctggagatacaaaaataatattatttctctgtttaaggagttgataatttgagtaagtacatctacaaataggtaatgtcaggtggtaagtgctgtgttactcactttcaaacaaagtattaaaggagctttatgagcattaaggaataattagttctgccaaggggttggggtaagaatgggaaaaattatgaatgccagggaaggcctaaggcctaatacaagaggagataactactgagctcctagaattattaggttttactagggggagtagggcttttcatatgtaggaaagtatatagtacagtggttaagaacacagatacttggagttggactgatttgttttggaactggcccctgtagtttgttggggaggttactggaacttgatgaagtgcttaactagtaccagacacacactagacattcacaaagtgaaagctgctgctgccagtcttattcttatattatcattaaacaataagcaaagccagagcagtatggaaatatataatgttgttttctgagactcttgtaatatgactgcaagtaggatatgtgtatattagggaatggtttggactgttgggaagtacagtggaaaagtagcatggtagtcgtggttggtcttcacctaggtctcctttcttttttttattttaagttaattttattttttttcttggtagagacattgtcttactatgttgcccagactagtctcaaactcctgagttcaagtaatcctcccacctcggcctcccaaagtgctggaattacaggcatgagccactgcacctagcttaagtcccctttaatggctgatgtaccccccaagcctccgtgagtgttggctgctaatgacctatagcgccccctttctctagagtattgtcctctgccaagcagccttcttggttaggtggattttccgtatcccaccctataaccaatgattgacagataagaagatacaaaaggtcaggccctttgtgtcaaagcaatgccaactatatggtataatttatgctccagagtgccctgtgggagctgagactctgtccctacttagcttatttcccctgctctattctactgtactcactccccttcaaataaaattccctcaataaatagcttgcacaagaatccctgtctcaatccttcagtccctatctacttctgtggatcctaagatttggggctagatcggaaagtccttgaatacttgccttagaatcctataagtgctgtcttatagacattggaaacctaatgcattttaaaaggatcattctagtaaagagggacatggaaagtggctagaagcctacgatgggaactttctatcatctaagtaaaggatgataaatgccttaatcatttatcattgattaaggttggggaggtgagatacaagagtcatttgtagggattggggaagaactgagaagtcataggtaatttgaatgtggggagaaggaataaaaaaccttctagactggatgacttggcaaatagttgtgttaatcggcaaaattggactcgtaggaagaggtagttttggagaaggttaatgagttcagtttgaatttaagttaccttgttgaatgtcatagatggaaatgtaccgtaagtaggtagaaatatctgtctgcagtatggaaggtgaggtcaggttgacaacatgaaggtacagaatggacatccctaatctgaaaatgaaaagtctgaaatgctcgaaaatccaaaacttttgagcaacaacatgacagtcaaaggaaatgcccgttggagcatttttgatactggattaggtgtgctcaccgggttaagtataatgcaaatattctaaatttaaaaaaaaaatctgaaatttgaaatacttctcaactcaagcatttaggatgagggatactcaacctgtagttgtttaagttatgagggaatatggggcccaagacaaaacgatgggaattccattttatcatctggaacgttttcagccgcaagtaacaaaattgagcaagctactttaagagtaaaggggattggccagctcggcgtggtggctcacacctgtaatctcagcactttggggggctgaggtgggaggattgcttgtccccaggagttcaagaccagcctgagcaacatagggagaccccatctctacaaaaataataaagaaatcagctgggcgtggtagtgcgtgtttgttgtcccagctacttggaaggctgtggtgggaggattgcctgagcctgggaggtcgaggctgtggtgaactatgattgtgtaactgcagtctagcctggacaacagagtgagaccttgactcaaaaaaagtaaaggggatttattagtttagtatgtaaaaatccagtggtagggtgggattcagggttttttgatgaggattctgactccatttttctgtgattatttttgtcctgccaccttcttgagtcagctttgttctgaatcttgctttcctcatggaggtaaagtgactccagtgattgcaagattccatcagcaagctgcatattgtaggagagagcatctatgttcctgaattcctggctgaagtcctaagctttgagctgattaatcagttttgatgtagggcattgttaccaagcaaaagagatccctctaattggttaagaccagtcaggggttatccatgaagatgggttagtctaaccaaaagggcatggctgctatactaggaggagagtggatgtttgcaaggaaagcacaaagttcactcttatctatcatccatcataaaggaaagagccagtgaaaaacagggaaatggtaagagagattaaaagagggccttagaaaatacctgagcccagagtagagttttaaagagtggaaaggattgttttgttttgttttctgtttgttttttgagacagggtctggctctgttgctcaggctggagtgcagtggtgcccttccggctcacatcagcctccagagtagctggcactacaggcataaatggaaagggttttgaagaagaaggactaaaacagtgtcaattcaaacagcctttggatttggtggagaccaccagtgatcttagaacaatgcctacagtctggaggagtaagaatcagatggtgtgttggtgatgaacaaatatatgccaatgatatagaagcagcaaatgtatatatttttctttctctctttttttttttttaaagaaattagtaaatagaaggcggcagtttaaggaataactggattaagggcggttaaaaagtaaattgtaaaaaaaagattgtgaaagactttctgctcttgtttgctggatgaagagaatgagtttatggcttgagtcaggcagtcttggtttgacctctggctctaaagacagcttcctgtatggccctgaacaagctactcagttttctcagcttctgattagtgatgaacataataaacatttcataggaaagctataagggttaagtaagataatgtaattgtggaagagatttgtcaactaacctgttatacaaatattagttgatagtaagcacattgtttatttaaaccctatcttctcataaaagaatgtaagttattttaaaaataatagtatgtatagctgaaaggtatgtagagttgagaaaggggaaaggcaagtgaaagaggagagagagagaagaatgagaatatgaatgaattaataaagcatgactccagttcaaaaacagttattcctcttagcatcctatgtaactgtgcaaagccaaaagcccttagatttgacataatttttgctagcagtattttgtgtggccccagagagaggcctcttgttgacttccatatatacagtttcagttccttttgtaataaaaagaaaggaacatggtacagaaaggttattgtttaggttatcaagattacctttatttgaagttgttgcaaatagtagcaatagtgataataatgtttaatagtgataatagcagtagcagttgctgtcatccctaagctagtgtatgattgattttagctttgtctgactctaaaaatacttttagccacattctagtctaattctaaaattctttgatcatacattcttattagttaagttggtagatcttttatagtaattaaatagaattttattcctgtatatttatttcttaggtagaacagtatcacattctatgcttcattttaagcagtcctgccgggcgcagtggctcacgcctgtaatcccagcactttgggaggctgagatgggtggatctcctgaggtcaggagttcgagaccagcctggccaacatggtgaaaccctgtctctactaaaaatacaaaaattagctgggtgtcatggcgggcacctgtaatcccagctactcaggaggctaagacaggagaatcacttgaacccagaaggcagaggttgcagtgagccgagatcgtgccattacactccagccttgggtaacaagagcaaaactctgtctcaaaaaaaaaaaaaaaaaaaaaagagaaacaaacaaacaaaaacatttgaagcagtctgatattttcaactacacagggagaataacagtacttactttatatggtgatagtaaagatagaatgagctaaaaacaaaataaaacaaaaccagcttagagtggtgccaggcatggttgttagtggctagtattatcattcttgttgttttttttatcagtgcttgatataaatgagaaagcactaagtgaatgggtacttcagcataaaagagttgttgaagacatgtggagatttagttttgaataaattaataataataagtttccttaactacaactcagattccatgctggtttccattgtggggatggcactatacacaggatacgtcttcatgccccagcacatcatggcgatattgcactactttgaaatcgtacaatgaccaagatgcgaccaggatcagaggttccttggggaagacccaccctacgaagttggaatgagaccatcagatgtgataagaaactcttctagatgtcaacataaccaaccttataaagactaaaattcatgagtagaacaggaaaatcatcctgactcatgtgttgtgttctttatttttaattttcaaagaggctcttgtatagcagtttttgtctattttaacattgtagtcatttgtactttgatatcagtattttcttaacctttgtgactgtttcaatattacccccgtgaaagcttttcttaatgtaactttgagtacattttaattgccttctatttttaaaactcaaaatcattagttgggctttactgttcttgctattgtatggcatatacatctgcctggatatatttctactcttgaccaaagttttgtaaagaacaatataagatttcgggtaggggtatggggagggaagatattttattgagaactacttaacaaaagatttatctgtaagcttgaactcaggagtacagttttagctatctagactctaacagcttttgctttaaaattattaaagtgtttcttaatgaaaaagaaaagatcttgctaaagttaaaataaggaacatttcaccttttaaatatttaattcttatgtggacttatttccagaaaactttggtgataattcttgagacaaaaggtggttaagtagcattattatgtaatgcttatataccatagagtttttaatagaagagaaatccatttcctccgagggtcactattaacaatgtacttccttaaatttagtttaatgattgtaatgggtgctgcatttgcacattgcattaagttatgatgagacgaattgttgttaaaaattatagcaaaaagaaatgtaaacttggttaaaatcctttcactctttgtattgttttttttaaggtttttattccttaaatgtaaaatgactacctaattttttgatgtaaatacattaaattcaaagagaaaaaaaatcagctgatgtagcagtatatcttttccttgatggttaaatattgatctagtatttatattgctgaattattttctgtggaggaccagataagcagtaagtatgtcttatcctatatgttttgcaacataaaaatattgctaattgaaaagaattaggcaattatgtgtgttgctgggttgtttttttgtttttttttttttgagacggagtcttgccctgtcgcccaggatggagtgcaacagcatgatctcggttcactgcaacctccatctcctgggatcaagtgattctcctgcctcagcctcctgaatagctgggattacaggcacctgccaccatgcctggctaattttttgtatctgtagtagagacggggtttcactgtgttggccaggatggtctcaaactcctgacctcctgatccacctgcctcggcctcccaaagtgctgggtttacaggcgtgagccaccgcgcccggccaaaattgaggtattttttgccctacgttttaaggactagacttttgaagtattttatagtctagaggtctcaagtaatatatatgtgtttaatatttttagagccaattgataccacaattagataggagtagtgagaataatatggaattacttggtttgaagtagttaaaaattggatatggttatatctgagctgtagtcatattatctcaagaaaaataatacgaggatttaacataagatttgttctattaatgcccaaatttggctttcctctactatcccccatagagaaccactaacaagtggatgtctaatattcctctggtgagttgaaggcaggagaagttgagaatcattagtttcaatgagtatccaggtgacctatcctggccctctactcagaaaccggcaatttgtcttcactctgagattcattaaattgctgttgtataactgatggttattatgaacactgacctgtgagacatatggaagataaagtttggtcttacaggaaatcttgaggagagtcaaaagagaaatgggagatgtctcttgagaggtgatcagagaagtttatgctcactgtctgatgcaaatgtctggtctatttgttagtaaataacagggaaatcattttcactttttgttaaaaataaggtatttacaagcataccttgtagttattgtgggttcagtttcagaccactgcaataaagtgaatatctcaataaagtgagtcacatgaagttttttggttttcccctgcatataaaagttacatttacaccatcctgtagtctattaagtgtgcagtagcattatggctaaaaaaaaaaaacacccaatatacctatcttaattaaagaattatttattgctgaaaaaa

SEQ ID NO: 13 - DNA, 61409 bp, Homo sapiens
gtgacagtagctggggtgaggccgtcgtcgccgcacgggctggttggggctgtgtctgtgggaggcgccggggtgatggcggtggagactctgtccccggactgggagtttgaccgcgttgacgacggctcgcagagtaagggagctgcagggcgagggctgcgggtggacgctccttcggcccgccgctgttctgggctgggcagcgctcctgcgagagggacggctgcgcagccgtctggtgcgggacacttcagagcccttggggtgtgcgagggacgcgctctccagcgttactttcggggttggggtcccagccacggcgggtcaggctgcccgttcagggctcggcgtgtgaggcggagactctcctggggagcctgcggtgccccgcggggagcggcgtcccccttcagctgccccggggcttgggcggggcgcgcccgggaggcccagcggccccgggatcccaggctgcttctgtctctggcctcttggggatttcgccagattctgagcgttcagctctggaggacgctgatgtctgggttcctgtttcggtttcctgtttttcttcttttcctcccaaatcaacttttgcaagtttgggtgtctttcccatcgcgttgctataaccgtagaagggagcgaaaaaagaacttttcaccctgcgaaaataaacacgtgaatgtcattttatcattttccaggccttttatttatgctaagtgatatttttcagtgatgttctgcagtttccatcgcagttataaaggcttcaaaaattacagcaaatcttcaaattttgcttcacaagatcgaattgtctgattttaacttagaagtctatcccgaaataaacaaattgtgtttctttcagtaaaatattgaggccaaattaattgtagtgaaactctacttgaaataaatacaagttggcaatctgcttcttatctttggtcatagtaatctgtgtaagtgatctaagagagattggagcatgctgtttgtgattttttttttccctcatagttttcccaaaaggtggaacgttgcttttaaaaattccggatgaattttgcttgatttacgaagagagactaatgcctacaatgttagatgaattaggttttacaagtctctcagagaagagtgagctacatccaggatgggttgcagtttttcacaaaacattcctgaggtcaggagttcaagaccagcctggctaacatggtgaaaccccgtctctactaaaaaataaatagctgggcttggtggcgagcgcctgtaattccagctacttgggaggctgaggcaggagaatcgcttgaacccggcaggcggaggttgcagtgagccgagatcgcgccattgcactctagcctgggtgataataaggtattagctcttatgcagcataaaaattaaccttggagataatgacaaaatcttttaatttttttttgtggaggggattctgtattgttataaagtgaactgtaccttgtcatatatgttttatggacaaagatgacgaactggtatcttcaaaaaaaattggaatagagttatgttaattgagtttgaaaatggttcagcctggagtagaatggtctgattcactcaacagatattttctacaaccagtggctgtgctagatattagggataaaaagataaaacaaggagtgcagtctgttgacaaagatgagcatgttaagtaggtttttggaatttttactcttaaaaaattaccatgtagttcttatctcaacttttgttattttaactttcaccaattttacaaccgtttattgtcagcaaggaacttttaatgttattttaggttttctgtttcctgtttgtgaatccctgaacatactaaaggagtgatttattggcgtggtgtttctctagcattgtctttttttttttttttttttttcgagacaaggtctcactctgtcgcccagtgccgtggcatcgccacggctcactgcagcctcgaccagctgagctcaggtgatcttcctacctcagcctccttagtagctggctgattttttctttttaaattgggatagagacaaggttttgccatgttgaactcctggtctcaagcgacccaccggccttggcctcctaaagtgttggggtgagccaccatgcccggcctagcattgtctttaagaagtcatttgctggtcaaatgcagctttgactggtcatttcctgtgtagttgagaataagacaactatttggggttctgagaatctgggcagtcttatatgtaagctgtagggaagagaacacctccctgtgcttggcgttcattaatttttggtctgtgaatcatatctagactaattgttttccaaaattgcctagattaatgctataataagacagaaaccttaatgaactaaatggattcaccggatttaaaactttatgtggttgaagaataaaggagagtgggggctaggtctttatactttaatacagcatgagtcagaacacactttctcttacttgcttcacattgctaatttgaggagagcaaatttttaccttttttagaagacaaaggttgaataaagttattcatatcaataaaagaaactgagttggagttgaatttgttacctttgggaacaagtaatgaatttttatgtgtaacgtgaaatactttgacgaataggcatattttaaaatccagcttattccaatgattccttaaagttacctatgaatgtgttaattctgtgaagaacagcatagtattctgtagtcaagcagtgttctttgctggtttttccaacttgattatgacagttaaataatttaacaaatatcttggttaaattttagacattatagaaataatatgctcaagcaggtataaaacctccatttaaaaatatttaggtgtattattaaacattagtgtgtatagaattaaaaactacatttttaagtgttacttctgtgacagactgtttttttcaccttcagatcatgaatatttgtttttgcaaaagagttgttcatgactaaaagatagaatcaggacattgaattgtttaaggcacttttcagattggttcaaagccctctattatgggggtagatgggctagtggctttttcataatatgttagggttttaaggtagtaactttatatatggtaacatctactgcttttaaaattatttcgtgtatagagaagattgaaagctgaattgttgtttaactttggaactttattttcaggaagtccagacattccagagtaataattaacagtgctttgcgtgacttttgaggttatttgaagtaaatgtcctgcaattcattacttgcacttatcacatactgttttaaaatttaaacttagaaattcatgccgaagtccaacttaagaattatgggaaatttcttgaggagtatacctctcaactgagaagaattgaggacgctctggatgactcaattggagatgtttgggatttcaatcttgatcctatagcattaaaggtttgatttgattttttaaaaatatatgtatatattttctggacatactatatcctgaaaacataattttttaaaatggaaaaagtatttttatttgaaatctaagaacaaaatgaaagttggagaaaattgttaatttccttttctctaagccatgcagatgttttttaaatgtgtgtgttttctgtttaagaatgacaaacacacagcctttagtgtcaaagaatgacacaaactccaagtctttgagcttgcctttgattttcattattaagaaaatgagggctggatagaatattcaggctttgttttttcttgattgagactattttacatagagtgaaatgcagatactcttaattttgccaaacacttgtaactcatatcccaattaagatagagaatattttcaccatttctgaaaagttctctcatgctatatagatgttaatgtgtgagtaattttttaatgtataaaatacattactctttccattttgaaatatttcttttatctttaaaattagtttgttaccacttgaaaaataatttacattttattgagcacttgtgtattacacactgtcctaagtcacacactgacttgtttttataacagctttcttgagatataattcatatatcatacaattcactcatttaaattgtataattcagttgtttttagcatattcactgagttgtacaaccatcacaacagtcaatgttagaacgttctcagcccccaaaaaagaaaccatgtaccgtgtgataatcaacccccagttcatgccatggcatacctgccctaggcaaccaccagtcaatctactttttatctctatgtgtttgtctcctctgtacacttcatataaatgaaatcatacgatatgtgctcctttgttgctggcttctttaacttatgttttcaaggctcatctatgttgtcacatgtttttagtactttctttttttgctgttgctgaataatattccattgtaaggaatggataaccacattttatttatccattcatcagttgatagacattggatttttctactatttggctgctatgagcatttgggcacatgattttgtgtagacatatataagtatattgtatataaaatgtgtgtacattgtgtgtatattttatacatatgtatatatgggagtggaaatcctgggttatgtggtaactatgtttaactttttgaggaactgccagaatgttttccaatatggctataccattttacattactaccagcactgcatgagggttccagtttctctacatccttgccagcctttattgtcttgattatattcttcctagtgaatgtgaaagctcattgtggctttgatttgcatttctgatggctaataatgttgagcatcttttcatgtgcttatggccatgtgtctgttttctttggagaaatgtctgttcacatcctttgcccatttttaaattgggttatctttttagtattgcattataggacaagtattgacttttaattcccaccacaatcctataaagtagatacaatgtcatctccatttgtaaatgagaaaactaaggcatagaaaagttaagtaacttagtcaagtaagtgacacatttagttaaataatgaatatcaggcagcttgactccagagcctgtgcccttatccaataccctgaactgcctcacaaatactttatatatttgtaaactgaaattactttcctttgacttcttttcttgcaggctggatagacttagtcttactttaaaaatcatccccccccaaatttgtaattgtctctttttgttcctcaacacttctgtgagaatcattgtatgtaagttataggaactctactaggaaactgtcattctcaacctgtactatctctgagggtaataagtttcatatatctgtcacttggcattaagtaatacatgttgattttttaaacagatgctgttgggctttctcgccattaagtaatacttgttgatttttttaagacttgctgttgggctttaagggcctcttctagataggattataaaatctgttttttttctcaactctcagattttataaaagggtgaaatcatctcttagtttttatcttcccctacagaagctttctaatctttacaatcttattatatgacagactccatctccgcagttgctctcttcggaacctctgtttaagttctattattgggcagttattttattgtttttactatacaaggttcttagtattttgggaaaaaccacaaactcagataaaacctctgtaaacaaaaattacaacctaatgagaaagggtatataataacttacttgcataaatagttagttagtatgtaaccagaagggagatctgagatttcacttgataaatagatcacatatagtcaatgatcaggaagaggtggaaattgaacgggctttaggagtgaactccacatactattttaagtgtttctgagcatggatttatacaagaaaagatgtattttctgtcttgtttcattcttaatttattttgaccctttagctacaatatcttattaaatttgtggctgcatagaaaattcaaaaatgatgaaaggtttttccccatgatcataactaatggagtttaataatgttactattaccttattaccttgcattttcttatactgcactcataatcagccaccttatgctccataggacaagtagagtcgtgattgtgtcatgttgggccatttctttccttacgtgttgtctaatgagattgttttggatgaagtagttgatatggtgctaatgttgagtacaggatctaacacaagtttaagtcgaataaagctagcctcaatttgtgtttttaaaatttcagttatttttcaaattaaaagaaatgttcttttcctttgtttctgtagcttttgccttatgaacagtcctctcttttggaactcataaagactgaaaacaaggtacagaatcctaaatctaaaaaattgttttaaaaatgttttagttatctgtaacaatttactttttattttgtttttactcatgaaactaggtcttaaacaaagtcatcactgtttatgctgcactttgttgtgaaatcaagaaattaaaatatgaggtaattatttgaattcttgtcttaaaactttaaaaacatcatttagaagcaagtatgtgtttatatatgtacagtgtgcaataaatatttattgaatgttgaatgaattatttatttaacgtaatactaatacggactaccattcattgagtacttagtatgtacaaaacaccaggctaacactgtaatccttatagtaaccccaggaggtaggtgagacattgatgaggaaactgaagcttaaagagagtgtcacttgcataacatcttactggtagtcaacagtttgaatctaggtttacaaacctccagagtttgtgttacctgccatatatactggctatctagagaaaactgatttttttttcttaaaatgcatttagttttgtgtttccttacccaagaaccattaaaagtctggtagaagttgacaaacttcgtattttcttctcctgctttttgataccatgtggttgctctttatttcccataaactaatgggaggatgtgggacagtgagggtggtcagataagatgaagtaaaggctaaaggaatcaagatacagctttgagtatcagtaatatttttgttactctaaagatgaattgctttataaacagattttgaatttaaatgaatttgtatgcaaatgatgtagccctctgtttattactaagtatacagatctaagagagcataggaatttggaaacaaaacaacctttaaaattattttaatttttttcttaaaaacaggctgaaactaaattttacaatggtctcttgttttatggagaaggaggtaagtttaaaattccaaattgtgatgcctttttgatattgaaatgaacaaaaagttaacagacaattttaggactactatgattatataatagtgtgagaaaaataagtattcatattttttgttggtatgtttggtaaacaggtaaaaaagctgaggaagcagcagcaaatttgtgatatctttgtactttacgaagtactgtaggtagatgagaattttccttgaattcattaaatagtgaagcaaatacttctaattatttgattaatgattgtctgatttttctctttggtgtaaaaattctgttttcaatactatgcagagtaaaagatgtcctaatgaaaaaaaaaaacttttcccccttttttggtattgattgagtttaaatttaaaaaatgaaatatgcttattcatgttgccttttacagctacagatgccagcatggtggaaggtgattgccaaattcaaatggggagatttatttcattcttacaggtaactgatttttactttctactgagcttttacttcaaaaagtttgagtaaattacacaacacgtaaaaagttctgaaaccttcaaatactaaagatgtgtactctgaggataagacacttaattagcattggattatagtttaggagatcataactcctaaaagatttccaagtatttttagaggaaaaagctatcaaaataagtttctttgtgtatatttctttatggacaacttgtcaccatgccttttaaaataatttaaactttgtacccactggaaaagataaattgtatcaggaaaagttgttaacggataggagagaattaagctattacatgagcaatgatgaagttgtttaaagcggtagccctccatgcttctaacagcttgtttcagtttagatagcttctcatcactgccagttttaatgattgtaggtcctttggtttactcttatcaaaagaataaaatggcttctatttcctcctctgtgataaaaatagtgcatgtacgatgtgaaaaagcaaaaattgaagctaaggaaaaaatacccatagtcccacctcctttctgttgttgagtacaagatttgatatatttcatcaaattaggcatgctaacatactgttcaaatcttttatatctttactactttttttggtctaattgatctaattgagagcattttgttcatattgtgatatgtgttattcagggtcctgtctagaaaactccatacaaggtatttcaaaagatgtagtttggaggatacaaagtagcagatatgtaagatgagtaagtctagagatctgatgtacaacatgaagattacaggtaataaaataccgtatatggcattcatgctgagtagattttagctgcttttgctacaaaaaaatgggttagctatgtgagatgatggatttgcacttgactatagtaacctttttattatcggtatgtatcccataacatgttgtataccttaaatatacacaataaaatgtatttaaataagaagagaggggattcaatatagagaattggttacccaggagttggaggacaaagaaaatactgaggtgtagtccaaaggaaacagatacctcctttacatccagagaacaaaaaggataaagattgggattgccaggatctgggagcttggagaagaagccccatgaaactgatgcctatgctgaggtggcactgcctatctgctgctggcttcttttccagcaaggtgtctaaaaaatgtagttggtaaggtcccagtaaatgtggaaactttgcatttttcattttgagggtattttattcagtgtgtacaagtttagaattgttaatcattcctggtaaattgaatcttttatcatcatttgtgaccttccttagctatgatcatgattatgtgtatatgattatgtatatgtattttacatgcatagcaatttactgtactgatgctaatcaagtctgttttgtctgacagtataataataatgctgccctggctccgttttagttaacattttcttgatttatctttttccattctggcagcctttcagtgtcatgttttagttgggtttatttaaaaccacatatatctaaattttgcttttttaatgtagtctgacaatacctgttttttaatcgcttaatttattctgtttctaggtctatcttatatagtctgtatgtatatctgggcttgtttctgcctttttactttgttctttctgtttgtcctacattttctctgctttttttaaacttctagaagtttaataggacatgtaaaactataactatttaaaaataaaatgcgttatttattttcattttaaaaaatactttacatcatatttagatctcacagctgcataaaaattccgtttttaaacattcaacaaatatgttttgtaagcctagtatatgctagaaactgttattggtgctggtgatatagcaatgcacaacaccaacagaaattcctgttctcatagagcttaaaatttagatcagcatagttttaattaggttttaaatacttcagatacacactgtttctataggtttaaaagttgagagcttctgaaaatggattttcagaaagtctaggatatgttagatatgagctaattatttaatgacaaacatatccctaggataagtgatacgacatttcacttgctgtgtgccaagcctgcttatacatacgattacaggtgatcagtgtttgaagttattttacagtgacttctggaaaccccttcctgccatagttgtactttctatactggcagcttttgagctccttcactcactcagatgtttattcatgtaatagggtagaaatttattgagaagcagttgagtgttagtcactatgctaggcagtggatattcaaagaaggaatgagacagcacctatcatttaggagttatataagtaactacaatattagacttgaaataggagtatgaatgaaatgcagtgggaacaaagagataggaacgaccctggagtacaggaggtgagttaagtattgattgcttgagggatgcttgaacttgtctggcttttggttaactggaggctttattggaaaactgttttgtttttgttagagttgttaccataaaattcagtaaaaaatggtgagatttaaagagtaactttataatatatacccaccttctcgtttcaggaactgtcttgctttgttacgaggtgctatgaagtggtgatgaacgtagtccaccagttggctgccctctatatcagtaacaagtaatggattttagaaatatttttgcttttataatagagatgcagaaaatgttctttctaaaattaataacttgtaatagtttttctttcattcagcattctttgaacacttatgatatttcaaacactacttgatgtgtatcatacgtaggttagtaagatgcagtttccaccatggtgagcgaacccattatctgtctgaatgacagtgtctacagaacaatcttcaagaaatttgaccatatagaagaaggctaacatggaattagtacatgttctgtgttctctctctttattcctttcctctacacgaatggttgcctgactctaatggagtcacttgagacttttcttagactacagaatcttgagggatggagctagggaatctacattgaagaaattttgtgagtagttctaatggtcgtaaatatacccagtaaaatataccttaaatatacacagtaaaatttatttaaattaaaaaagggaatttaatatggagaattggttacatgggagttggagggctgaaaggacaaagagaacagtgagttcatccggaggaaacagataccacctctccatccagaaaacagaaaggaaaagattgaggttaccagaatctgggagcttggagaagaagcctcatggaattggtgctcgtgccactgaggaggtgatactgcctggctgctgctggaccattaccctaaatcaagaaaaacgatcacattttcatagagctcttgcagttttaccacaaaataatatctcatttgattagttctttatacttaaaattttttttccacacttacaatctaattaatacattaactttgtttagctctatgtctagggattattaatgatgagaagagataactgatacctggaagagataacaagagcaattttggcactgttcttttggtcaccagcacattcattgttcttactataccatgctgcatataaactctttatactggagtgttaactgtttcttattctcccattttccccctcagttaggtatttattttatgttctgtcttttcactaaagctctcatggcaggagagaatgagagtatagcttccatacccgctgcagtacctgatgggtagttctaagaagactccccctcatcctacccctgccctagaaggatgaaatttatttgaattttgtgtttaaatttaaaatatgcattctatcttgtggaatatctatatgtgctttaatattataagcactatttaaaacttgttgagcaaaatgagtaggaggtagaagtgaatttttctttgacttttgactttggtataattctagtagtatgcactgtttttcagtagggatgagaactcaaacccaactgaagagaggactgattcctaaagaccagtttggaggctgggcgcggtggctcatgcctgtaatcccagctctcagggaggcaagaggcgggaggatagcttgagcccaggagttcgagacctgcctgggcaatatagcgagacccccttctccacaaaaaggaaaaacaaaacaaaacaaaaaaacaaaagacaaagaccagtttggataggataacaaaaattctagttggtaattgagaaattctaatagtttagaaagatatgaataccacttttaatatttctctacctttattccaagataaatcatttgggtttcaatgggtaaggttattcataggtcacctatcatcatagccctacccatgagtgggatataggcaagaatactattaggttggtgcaagaattattgctgtttttgtatcacagttacttttgcaccatcctaatagtatgcacaaagtagttctcttcttgggaaagtggacttgacgctcttaaattttaaataactagagccttaataaagataaatattaaaattccaagatcatctgctcctgtatgtatttgaaataagaataaactatgacaaaaaggaagttttttttaacttggttgttattttattataggattgcacccaaaattatagagacaactggagttcattttcaggtaaaagacatttagcttgacctgtaaaactgtaattattactatattttactttggagtttgtatggttggagagtatgacagtcataggaacactcttaaagaggcgtgtgtgtgtgtgtgtgtttgtgtgtgtttgcatttgttctctttcatctgtgaagttgatgagtcattattgaccattatcagtgtaacttagtttttcccagtagtgccgtaatgcagattctctaaatgatgtctttggacagtgaaataaatctgcagtattgcaactaaggatgaaattttgttcatcttaaaaagagaaaagtattctctatttaagactaaaagacaaatagtcctttctgaggatccaacctgtagctgaataaattgatttacccactacttttactaattcagtaatcagcccaaatgattttactttaaacgtctacatgaggcttaacttctaactagtgactaaatgataatcattaaaggttttttgacagactatgtatgagcacttgggagaactgctaacagttttgctcaccctggatgaaattattgataatcatatcacactgaaagaccactggactatgtacaaaaggtacaccaattaaaatattttaaaatgtttcttactttggttaatgtatttgtgttagtaaaaagtaaacagatataaataatacagattttctaaaagacctggggattgatatttagaaggagctcatatcaaatatttttatgactacagtaaccattctttaatttcacatgagtttgttgggacgagtataatacatctgtataaagcatcctaattcttatagtagtagaaagttaatttgcctagcttaggactcagatttattgttttccttgggttctattcaggtgacagttttttcttctttttctttgttgagacagagtctcactgtgttgccaggctggagtgcagtggcgtgatctcggctcactgcaacttctgcctcctgggttcaagtgattctcctacctcagcctcccaagtagctgggactacaggcgtgtgccaccatgcccagctaacttttgtatttttagtagagacggcgtttcaccatgttggccaggatggtctccatctcttgacctcatgatccgcccgccttggcctcccaaagtgctgggattacaggtgtgagccaccatgcccagcccgacagtttttctttcctgagcttggttttattttattgtataccctgaattttttttagaccatggtttattttattcatgttctgagtacttattaaatgtctggtatgtacagattatgaggcattttgattgaagatgatattaaaaagcgtaagaaaatctattaggattgttgtgttcaaattttcaaatgtgtagagccaaacaagaaatataaatataaaattttgacttccaggaaaatttttaatttttaatttaagaatttattaggtagatttaagatgtttctcttaattttcctcaaggttactgaaatctgtccatcacaatccttcaaaatttggaattcaggaagaaaaattaaagccatttgaaaagttcttgctgaagctagaagggcaattactggatggaatgatattccaggtaagtaggtctgtatcagactgtaacagtggggctcatattagacgacaaagctcagaattatagtaggacacttttataatatactgttgaatataattttctttaaaaagtgctttggcttaaaattattgttacagtactaaaatatttctgtatctagtagccaacaaaatgaatagtatattagttgtatttggagcaagagttttagaaaaattatgtaaatggataaaaatatttgaggattaacatctaatcttagtagttaggtataggcatatcttgttttattgcatttcgctttattgcatttcccaggtaattgcattttctacaaattaaaggtttgtggcaatcctgcatcaagcaagtctttcatcgtcatttttccaacagcatgtgttcactttgtctctgtgtcacattttggtaattcttgcaatattttaaactttttcattattattatagctgttatggtgatcagtggtttctgatgttactattgtaattgttctggggtgctacaaatagtgcccctgtaagatgatgaacttaatcgataaatgttgtgtgtgttctgactgctttatcaactggctagctcttgtcctttctccctctcttcaagcctttttattctctgagacacaaccatattgaaattaggccaattaatagccctacagtggcctctaagtgttcaaacgaaaagaagagtttcatgtctcttaatcaaaagctagacatggttaagcttagctaggaagtcatatcaaaagtagagatagggccgggcgcggtggctcatgcctgtaatcccagcactttgggaggccaggcacgcagatcacgtgaggtcaggagttcaagaccagcctggccaagatggtgaaaccttctctctactaaaaatgcaaaaattagtaaggtgttagggcaagcgcttgtaatcccagctactcgggaagctgaggcaggagaatcgcttgaacctgggaggcagaggttgcagtgagtcaggatcacgccattgcactccagcttgggcgacgagggagactccatcttttaggggggtggggaaagcagagataggctgaaagttaggcctcttgctgtgactagctagccaacgtgtgaatgcaaaggaaaaattttgaaggaaattaaaatgctgtgaacacacagatgataagaaagtgaaacagcattactgctcatatggagaaagttttgttggactgaattgaaaatcaaaccaaccgcaacattagtttaagccaaagcctaatccagagcaaggctgtaactctctttaattctctgaaggctaagagaggtggggaagctgtagaagaaaaatttgaacctagcacaggttggtttatgaggtttaaggaaggaagctgtctccataacattaaagtgcaaaagcagcaagtgctcatgtagaagccagtaagttatccagaagatctggctaaaatcactgatagaggtggccacacttagcaacagatttttcagtgtagatgtaacagccttctattggaagatgccacctacatctttcatagaggaaaagtcaattcctggcttcaaagaaagccagtgcccatttgccattctgaaaatcttagggcccttaaaaattatattactctactctgcctgttctctgtaagtggaacaacaaagcctgatgacagcatatcaacattgaggcaagacccttggccagcaaaaagatgatagctcactgaaggctcaaatgttagcatttttagcaataaagtgttttttaattaatatacttttttttagacataatgctattgcatacttaatatactatagtatagtgtaaatataactttttttttttttttttcgagacggactttcactcttgttgcccaggctggagtgcagtggagctatctcggctcaccacaacctctgcctcacgggttcaagcaattctcctgcctcagcctcccgagtagctgggattaaaggcatctactaccatgcccagctaattttgtatttttagtagagatggggtttctccatgttggtcaggctggtcttgaactcccgacctcaggtgatctgcccaccttggaaattggtgtcactcatgtttttgtgctggttgggaactgaacctatggtttctgtgaggtgtgcctgtattgtgtttgctgttaacctctaggtttaggttttttttggttttgtttttgtttttgagatggagtcttgccctgtcacccaggctggagtgcagtggcgtaatctttgctcactgcaacctccgcctcctgggttcaaatgattctcctgcctcagcctcccgagtagctgggattacaggcgtccaccactgcactcagctaatttttgtatttttagtagagacgaggtttcaccatgttggccaggctggtctcgaactcctgacctcgtgatctgcccacctcagcctcccaaagtcctgggattacaggcatgagccaccatgcccggccaggttaaggtttttaagacaacccttaacaagtctgtttaattcttcctaggcccagggaatgtaatttgggtttgcacagtctagtatggtagcttctaactacatgtggctatttaaatgtaaataaattaaaatgaaatacaaaattcacttttttactcacgctagccacatttcaagtccttaatagccacatatagttaatgactagttatatcagacagcacagatacagaatatttccatcatcacagaaagttctgttggagagcgctgctttaagcaggttccactcgaaattgcattatattccatttataatatacttcaaggttacctttagtttatgttttacatgatcacagtttttaaccgattgatctcaactcttgtttacagttgaccctttgaataacatgcttttgaagtgtgcacgggtccacttatatacagattgtttttcaataaatgtattagaaaattttttgaacattagcaacacttttgaaaaaaacttgcagacaaatggcatagcctagaaatattaaaaaaacttgaggaaaagttaggtatgtcatgaatgcataaaatatatgtagatactaatctatttatgtgttaattgacttatgttatccataaggcttttggtcaacagtgtgctattactagttaagtttttgggtagacaaaagttatatgaagatttttgactgcacgagggtcagtgtccctaactttatgtttaagcgtcaactatatatcaatttaaatgttagttcattaggttaagaagataatttttttgttattgattctttttccaggagacatttctatacatgctataataaagtgctaggaaagtaattgtaagcagaaaacataaattctactcttaaaagtgcaaagtaaaataaaaaatatgctttatcttttatacatctctgaacatcgtgtgtatctctttatacaggattatagatttgggttcaattttattactttcacataactagtacccaaatatataaatacatatatatttttcattcacaaagatctaaatattagattagattaagaacctgagctttagttttagtaaaatttaaatgatgaatatagaaatttatcatacactgtatttagtgtatgatatttaaatgtttaatcgtttattattgagagtctgaatttctctttcaatgtttcctgtctaggcctgtatagaacaacaatttgattctctcaatggaggagtatctgtgtcaaaaaatagtacttttgctgaggaatttgcacatagtattcggtcaatttttgcaaatgtagaagccaaacttggtaatgtaaatcgcattttttggtttttgtttataaaatttgcatttccttaaaagcataattgaagtatatttgttctgctttctcttatgttattgatttgtaaggagaaccttctgaaattgaccagagagacaagtatgttggaatttgtggactctttgtattgcactttcagatttttcgaactattgataaaaagttttataagtctttattggacatttgtaagaaggtaagaacttgaaacttatttttcaatttgagcagattaaaaagattgcagataaaactaaatattttaaaatgcattttattcctgtttacaaaaataatttaaaagtattcacttgtaaaattcaagtattccagaaataagtaacttagtgaatgaaaatacgtcgtatttctacatcatattactacatattggtagatggtgttcagatttgttcctgtacaacttctcttagtgctactaatactacttttttcttttccttttctttgccactgattttcattactgaagatgaagaaatttaaaatatatttctttctatgtctttgctattttcataatgtggtatctgatttcaaaattgaaagattagtttgtgtgtaacatcaagtgatagtaactatgataacccagccaattttttaaaaaacttatgtacttaaatagaatgaaactaaaagacatgaagattcaagtttctattgttgcatttttttatctgacagtccatgaaagggtgttttgtgtgtgtgttatttaatattcaggtgaataaaattgtcatgctcaacaccagatgtagaaatgccttaactctgccacagtgaaagatatttgtctcataatatattaataagtattttttgtggttattttttcttgaaatcagttgtcttccatgtgtattatagaacttttaaacagcttgttgtttagcctgcatttaatgaattttccccttttcccttttctgtttcaggtaccagccatcactctaactgctaatattatttggtttcctgataattttctgatccagaaaataccagcagctgccaaactgctagacagaaaaagtcttcaagccattaaaatacacagggatacttttctacaacagaaagctcaatcacttaccaagtaggttttataaacaagtataatgaaaatatttagatatcctttattttcaaagattatactaacacttaatgtatagtaccatttgaattataagattaaatgtacttgataagtaagggtcaggcaatctccaggagatttgttttctagaagttttttgtaaagaatattttacacttaaagtcaatttaagatgtagacagattatactttatggatacaaatgcgtacatacatagtttttatcatctgtgttaaatattttttgtccaaatgaagtctcagattttgttgcagtagatatcatttgatgacattaaaaacattctgtgtccatggtgattttgggagaggttgagtttttcttgatgtgcttcctttttcccccttctttttatttttatgaaaatagtatatgcatgtatataaaacatcaaaaagtgctaaagcttaaagggaaagataattcttcccagttccttcctgtatttcagtcttgctctccaaaggcacacttttaactctttgtttcttcttttttttacatccttattttttgtatacgtccttattttttatctcttattgtgtaaattttcaaatatacgtaaagtagagaaaatagtataaagagcccctacgttcccatcacccagcttcaacaattaatttattgcacattctttcttgagtacatggctaaaatcacgttaacttggataaagcttttgagtgaaatgacacaggactctgccactagccccatgctggtgacagatttttgtttgtgatatggctaaagatgtaatggggatacttacctactttctgttgattttgactatcaaagggaagttggatcactactatacattgggggaaggaagatcatgtcatttttagtactgccatgtcctctgattaaagtggaaaactacaacagatttaggcaggtctactcatttcagaactctagtagatatcctaaatcagggttgaagagggattaaaaacaaatgtttagatttagattaaagagctgaattaagtaatacaagatatatgtagagatttatctttccatttgagtagcagtaagtggggaaaaatgtgtgtattttagttcttagaatgttgatattttgtaacagtgtgatggagttactcaaaatgccaatacatacttagcttacattaataactctaatacccaggttgtggaaactagttagttatagtacaggttgagtatccctaattgaaatgctccaatactggaaactttttgagtgccatcgtaatgcccaatggaaatgctcattggagcattttggatttcagattagggatgctgaactggtaagtatataatgcaaatattccaagatctgaaatacttctggtcccaaccattttggatgaggggtactcatcatgtatctaggtcatgggaattgatagttgcattaaattccgttttgtttttttttttgatttttttttagagaccgagtctcgctctgttgcccaggctggagtgcagtggtgttatcttggctcactgtaacctctgtctcccagattcaagcagttctcctacttcagctcccaagtagctgggactacaggtgcctaccaccatgcccagctacattttttttttttttttttgagacagagtctccctgtgtcgcccaggctggagtgcagtggtgtgatctcggctcactgcaacctccgcctcctgggttcatgtgattttccttcctcagcctcccgagtagctgggattacaggcacccaccaccacgcccggctaatttttgtatttttagtagagactgggtttcaccacgtcagtcaggctggtctcgaactcctgaccttgtgatctgcctgcttcagcctcccaaactgctgggattacaggcgtgagccaccgcgccaacgcctggctaatttttgtatttttagtagagacgaggtttcattatgttgggcaggctggtcttgaactcctgacctcaggtgatccgccacctcggccttccaaagtgctgggattataggcgtgagccatcacaccaggcctctttttaaaattgtttttattttttatttttaaacttttaagttcaggatacaagtgcaggtttgttacataggtaaccatgtgtcatgggggtttgttgtgcagattacttcataacccaggtatattccatggaatttttattggtcagatcatagctggtgtttggtggtgccatgttttgagagggtcacaaactgcagcatccctagatgcagctgatcaggatgtcagaaggtctgagaaccatgccttcttgtttgtcttctctttgttagtgtctgtatagtttggcctttaaaagagaaatctgtggaatgatgtggtgggtttctttaaatatttgagggacattcagaatgaagagggaacagatttgatctctgtggctccagtaggctaaactaaaaccaaaaggtgaagatgacagatagtaatgataataattgccaacatcatgaagctctcaactctatggcaggcattatgctaatagctttaaacataccatgttccataaagcatgtaacagccttccggcagaaaataataaatgtaacaattaatgtttatggagtgcttactatatgctagtaggtattccaggaacttgacacatacctcctgtaatgatcagaaaattgtatgaggtagatacttttgttgccattttgtagatgagaaaaccctacagagattaaacttgcccaagtttaaacaactagtaggtggcagatgcaggcagttcaactctacagcccaggctgttaactactactataaaccatttttatcccatttttagataaaatgagtcttagagaaatgaactttgccaggtcacacagctaagtacatgtcagagagggcattcaaaccagtgccaatcctattctggtgcctctgcagcaggtagcattgtgtaggctgctctgtagtctccttcactaaagctgtgtaggcagaatatagataactgtcagtccaagatctgtgggaagtgagtcttactaagtggacagttgaataagttgactttcaaagacttatcacatgatgagattttgtttctaaattctttactacagagctccatgaagatgaagggcacagttatttttttcagtctcttagcagttatgtcaaggaaacctaaaattcactccactaaagtgaaactcagagggatgatgtgatcagcagggctttgtcctgacattttagagaaagttgaggggttgtctaagaggtgtcccaaggtcaggcttcagagtttatgtaagtgagtagggagcaatggagagcaatgagcaacagtattcctgcccccatactatacaccagaccccaagtggccagtgtcccagctgcctccttgactggggtccaaggtttgtggatttttgcattttgcttttgattcacaaccactttaacactggaaaatactgcctttagaggacagaggtctgaatctttgtttcaaccccccatgttgacatataggcgttgacactgtttagtgctttatgttggggcaggagatttgtttttttaccttggtatttttcctgtttgtactttgaaatgcaactgacaatccaataggacacttcacgatttttgtactctttgtcagttaacttgctttttaaaacttgaagcagttttgtttttatatatttatttatttatttatttttttttttttttgagacggagtctcgctctgtctcccaggttggactgcggactgcagtggcgcaatctcggctcactgcaagctccgcttcccgggttcacgccattctcctgcctcagcctcccgagtagctgggactacaggcgcccgccaccgcgcccggctaattttttgtatttttagtagagacggggtttcaccttgttagccaggatggtctcgatctcctgacctcatgatccacccgcctcggcctcccaaagtgctgggattacaggcgtgagccaccgcgcccggcctgtttttatatatttataagaggtaaagatcatcagtcatctggatgtgatcacagagtgatgggcagaagtgacataaaagcctctgcattatcctatagccttacctaaagctggctgaatgctgttcactgtgtattattgccttcttcatagtgttattgacacagttgctcatcagggagagttccatagtctagcctaggtctctttctgtggtccttgcttatgacttttctgttctctcctgtacatgggattcctgctgagtcttgatcacaacctcctcctcaaaagtgaaggtgttgctctaggactgtgctgtctgtttttaaaaaaggaccaggcttttaaaaaaggaatcattcataagtcaaacagtatgtttcagcaccactctaagcaaagccacaaagtatgactatttgtgtttttcgtctaatggaattatggctctgtagaaactgtttttctcagattttgtgctagggtttcacctccctgagtcacatttattagagattttgacaggatccttctttagattgaaatcttgagattgacagtttgcccagcaatatggctagctgctgacctcagtgtgggattctaaacgtaattgagtgtcttcagttccttgccctgaagagctatcctttagctgattctgacctgtaagaatgggacatttctttaccctgtgtaactaaagaagattttaaaagagttggtagggtccgattccataaaggagaattgcccatttttgcatactaagtttttgtttgtttgtttgtttttgagacggagtctcgctctgtcgcccaggctggagtgcagtggcgtgatcttagctcactgcaatctcttccgcctcccgggtttaagcaattctcttgcctcagcctccggagtagctgagactacaagcgtgtgccaccacacccagctaatttttgtatttttagtagagatggggtttcaccatgttggcgaggctggtcacaaactgctgacctcaggcaatctgcctgcctcggcctcccgaagtgctgggattacaggtgtgagccaccatgcccggccacatactaagttttttaaagaaaagtatagcttaaacagcttgtgaatgtaaaaaggttcccatctggaatgagactgagttgggaaacattgatggagagatttagtatttgtaatcatcccgaatagtagagagaattacattttgtattgccctagtctttctgggaggggaaagcttcctggatgtgagcttgaatcttggctgaacttatgatcttgctgcctacttaacttctctgtgtagcagtttcttgttctgtttggaggttgtagtacctgcctcataaagttaatgtgaggggtgaaagaggtagtgtgtgtgtgtgtgtgtgtgtgtgtgtgtgtgtgtgtgtgtgtaaagtgcttggaatggtacctgtcatgtagtaagcattcaataactattagcttttatagtccgattctgaccacttccactgttcctattctggttcaggctgtcatcctctttcttctgcattattacagtagcttttaggtggttttcctgcttttaccattgcctcctctgtagtttattttcaactcatcagatcctcttgaaactaaacttagatcaagttactttgctcagatcctctagtggctttctgtctctctgagtcaaaatccctactccttgtaaggccttccacaaatcccttccccatcaccccactccctccctctgtatctcgctcatctaatccctgctcacagtgcttcaggtatactgacttttttgttattacctgaacaagccagacacatttccaaatgtcttaggattttgcgtttgtctttcacttttctgcacttctcgtatatttgcatgaattactcattcatctgcttcaaactttggctcaaaatcacctactcaatgagcctactttgatcatgctatataaaattgtacctccaccccagtccttatcctttttcccctgcttttatttcttctgtagtatgtatcttttaattaatttaaaattttacttactgatttcattattatacagctctcctttctagaatgtaagcatcatgggaggagggatttgtattcattttatttactgctgatttcactgttgtattctcagtacctgtactgagaaacagtacctgggatgtttgttgaatgagtaaattatatatgtctatgtaatatttatcttttgaaaaccagaaagatgaaatgactgctgcagggaaataatgtactgcaatcagtatcaagaaatggaagtaaattttctttgctgagtaaccccaatattttcctttgttagagatgtacagtcttactacgtctttgtgagctcatggatgatgaaaatggaatctattttgtctaaagagcagagaatggataaatttgctgaagatctcaccaatagatgtaatgtttttatacaggtagttgcatcttatttcggggaatcatttttttgttaatccaacttacagaagttaaactttgaaaaaactgaacaaagggtagagtatgtttttgtttattaaagcaagttgatttggttatgttgggatctgtgtgacttattaatttaaattttctaacaacccattcaaagctctatattcctttacaacttgactatttagctgtatcgtagaagttttgatatgttgtatttttactgtcatttatttcaaactatttaaatttttattataactgtgggctttttgaaagatttccttattttgaaatatatgaggattttctagttattttattattgagttgtagcaataattaaataattttagtattttgaaatttgctttatggcctagcccatggtcaactttggtaaacatttcacgtctacttgaaaagaatgtataatttgtatttgtcagttgtagcattttgtatatgacaagagggtcatactgattaatgatattgtctgggtatttcagatactgagagtcatgttagaatttcccactattgtggatttgtctgtttatccttgttctgtagtttttgttttgtgtatttttaggctaagtatataatgtttagaattgttctgtcttcctagtaaattagaccttttcttgttaagaaatattccttgttatctctagtaatgctttttgttgtaggtctctttcgtgtgatattaactataactgttttcttttaattaatgtctgcatggtattatcttttttgatcctttcacttgtggccttcctggctccttatagttaatgtgtgtcttccgtaagtaacgtatatttttctcctatctgataatctttgtttttttttcttcatagtactattttttctatatgtcattgttgatatatttggttttaaactaccacctgactagttgctttgtatttgtctcacttgttctgtgtcccttttcttttcctctctcgctcttttttggagtatttttaattttatttctcctcctctctattagtttaattctatattattttattgttcttttagcggtcactctagacattttaagatgtatcgtttgctcatttagctctaatgtatgttagtagttttaccactttcctgacggtataaggatcttaaacagctttagttctatttatctccctctcatcttctgtgctgttgttgtgtactttgagttcctctgtattttaaacctcacaaggcattattatcgctattgttgtttttatagtcagcgtttatttagatttactcatatttacctgttctgttgctttttattcttcctacatctcttaattttcatctttctacttggggaatacctgctagtatttcattaatacaagtctctgttgatgaattgtaatagtttttggtctgaatatgtcttcatttcaatcattttgctgtgttagaattctaggttggtggggtttttttttttcttctagcttttaaaggtgtcattttatggtcttctggcttcctttgtttttgttaagaagtcaactgtaggtttgttgcttctaaaatatgtatctttctttactttttggcttttagcagtgttcctacaatgcccctaggtgtggttttctttgtgtgtttgtgctactttggggtcagtagagcttcttgaattcatgcaatattctttaccattaactcttcgagcattatttcttttctgtttcctctgttctaattctctcttcatctgtctctaatcaattcatctactgagttttaaattttaataattttactttttagctggcttttttatagtttacagttctcttctgagatacttgattttgtgttttattttcttcaacacattcagcttattttgaagcacatgtctaataatttcattatttgggtatttgtcttatctgttgtttctcttgtttttgtacatctcttaccttttatatacccagttattttttatagagtgccacacattatatatgaaaagctgtagacgtaatttgaggatctggatattttcttcctccagaagggatttgtatttgtatttgtatttgcttttgtacacagctagtctaggacggttagcaacccaggttatatcaatctagtaggttgatcaagatgatttgaagcaggattttgatcctgtgatggttgtttaattcacccttacttttttggggggttatccttcaggatgccaactcagaacttaggtggtttatgaaaaccagctccgatgagccccaagctcctgtttttatttcccttccctgtgagatgttgttgaaaggtatgtttggcttttgtctttaaggcagatgatttaagagaaagcaaccctgaatgccaggatcacttctctgagtttctgtcttccagatcttggccttatatttccttatttatttgaatcctctttgatgccttatgaggcatttttaaaccgttttgcccatatattctagttgttctcagtgggaaggctgatctaaattatttattctatcattaactaatacagactccagactaccctctccctcacaatttagatttcaaaatacatcccttcacaaattaatggttatctgggaatgagctaatatgggccctggagttctgaacttcaagtacccctaaaaaagggaagcctcctttttctgcctgacttagagttagatctttgctgttccttgtttgtgctttttaatttttcccagggctgcactagagtagggtctgatgtaatagtcttgcagctgacaaggtaagactgtggctctttctgcatgtatgtgccaagctttggtcttacggtcacctttcttaggatgctatcctctctttgattttttcattttcttaatttagcatgtctcttcgccacagagaaactttgtgtgtggttcagaggaactcctactttgcgctgagtatcattcctttagtgagccactgtttccgatgggagaatactttctttcacatgtggtgggacaggagcaaaagtttgaggaacattggcatatatcttctgccccacctccataatgtatctacaataacatagttaaggttccttgctaaactgtacatgtgtctcttttgggaactttatagacccaaagaatctccatcattatctttgtgtttttctgtgtgtcccttttgggtttaaatgaaaaagtgtttgagaagcaatatcccttttttcctttattccactgtttcactgagtttaatagcattaaaagaattttaacacctcacaagacctggcttccttcatgaatagaaggggagggagaatctgttctcattgggctggaaggagagaaagcctaatgcagcaccaaactaggcaaggatgagatagcagatggactgtggggattggtctaggtgaataggaaagggggacttggcttggaactcaaaaatttctttgcctatctgtattgactgaagaacagccctctttctccttatttttcaatttgtaactcctcagagtcctcagctcttgccttaagtggcaacagataggagtctttattctcttccctggcaggtaagataaggatgaatagatacctttctaacattcaaattgtttcactcaaagcttttttaagggaaagattcttaagctgtaattatacactattattttgacagtacaaaacttctggtatgtgacaggataaataaacggttagggctgctttgaaacttaaccaccatgtataacattgtctctgtgaggaagagtatttccaaatcttaagagctggctttaagatgaactttagaaacattagttattggtaagttgaggaatagctgctgttaaatagataatgaaatcttgaagaaaatctttccttgtgattataatcaatgttttcctttacagggcttcttgtatgcatatagtattagtaccattattaaaaccacaatgaatctctacatgtccatgcaaaagccaatgaccaaaacctcagttaaggcattgtgcaggcttgttgaacttctcaaggtaggttttagattattttactgctccatcataattgagaaatgacccaggcttaaattaggataatcttgtaaggtttgactacatgattatatgagaacagaaaattgtgagaaagtacttctctctcaattgaataaaggaactagccatttaaataaatttctgagtaactacttatggctggtcattatatttaaactttattaaataaagttaatatatccagtttacacagtaaaaaaaaaagttaatgtagtgagagagaaaagaaagaaaatggaaaagttaactttaatattatcagtaaagctttactcttggaagttttaaaaaggttgcatgagttaaaaaaaaaaaaaacagcttgtctaccattatccattatagtgtttacatgcgtatgaggttagttaacataaggctatttattttgtaatttagatgaagtgctgtaatcttgtgatttgaacagtggactacttacagaggtggtcaaatgaattaagaattacagtgcacttatgcaagtatggtaacgtgtttcttagcttacttctgtattaaagaaaaaacctgtaggcaggaaagtccagttaaccttttgtaaaaattgaaattaagatttgctggtaaattttctcctaataattgactagatttgttcaggaaataaagatttttcttttggagattctgcctttggattttcagcctttttttctttgtatgatttgtttatagatattttatgttagatttattttttatgaactataaatacagacaagtatatgtgtatgttagaatatgtataaatatgtaatacataagcatggttttaaaaataataaccactgtcccacttaagaaatacccactgtcccacttaagaaatagaatgttaccaatattttcaaatgctgtgttttttcctaattgcatctcaacctgtccacctcagaggaaactactgtcctgaattttatgtttatcattctcttgtttttctttttagcttgccaaatatggatgaatcaataaagcattaatcgttatatatgtttttgaagtttatattagtggagcagtattttatgtattttttgatccatttttttattcaacattttgttttttactcagcattttgtatttgagggtatccatgttgggatgagtagcacatctattttcattgttgtgtagtggatagacttcgggttgtttccggtttttgtatcataaacaatgttgccatccttgtatgtgtttcttggtgtacttgtgcaggagtttttgtaaggaattatatacctaaagttggttactggattatgtgttacgtatatgttcaccttttcaagatgatgtcacattgtctctatagacagactatatatatgtgtgtgtgtatatatatatatatatatatatatatatatatgcctcccacaatacattagaaaattacattagaaataaaattgtatttccaattgaccaacactggtattatcgagcttcattttttaaaataaattagtgggtataattggttttatgatttttaatatttaacccctgattgttagtgatggtaaatatcctttcaattatttattaactatgtttcttcttttgtgaaaaatctgttcatgtcttttccattttttttattggattgtgtgcctttaaaaaacaaaatctttcattcattttgggtcttcttatatcctgaacattagtcacttgtacctggtagatattttgtgatacatcggcttgcctttttattttctttatagagacttttgatgaacagaagtgcttagttttagtatagttgaatttatcagttctatactttgtaagtttttttttttttttgagacggagtcttgctcagttgcccaggctggagtgcagtggcgccatctcggctcacctcaacctccgcctcccaggttcaagcgattctgcctcagctacaggaactacaggtgtgcgccaccatgcccggctaatttttgtattttttagtagagacagggtttcactatgttggccaggctggtctcgaactcctgacctggtgatccacctgcctcgacctcccaaagtgctgggattacaggcgtgagccaccacgccaggactgtaaggtttttttgtatctcatttacaaatcccttccctagcctaaggtcgtaaagatcttctataattttgcctgaaatttttaagttgattgtcagaaaattatttctgattctttttaggcaatagagcatatgttctacaggagaagcatggttgtggctgattcagtttcacatataacacagcaccttcaacatcaggctcttcattctatttctgtggccaaggtatgcagcttattatgtatttagcataagtatgttatcttttttgtttgttctttcattgttttatatgtgttttctggtttaacctgtttattccattccttcaaacataatatgctcggttatttatctccatagtattttacaatttttacttcaagttattggcattatctttactgtgaaattgcagcatgtaatacattaatacacttctaaaaagacattgcacttttgaaattgatgcatcatttaaaaaatgatttcttagtaaattaacatggaaattttaaagtatgcctaatacatttgctgtttctgacagtactaagggatcatattacagaagtaaagtataaatgtcagaagcttaaatggggaaagtatttgtgtatgctctcttaaattgaatcatggaaaagataatcaagaagtttttcttctgagtcttttgttactgcctcagaaacaaatagttttcctgttttatttttaagaaaagagtgatttctgacaaaaaatacagcgaacagcgtcttgatgtgctctctgctctagttttggctgaaaacactctaaatggaccaagcacaaagcaacggcgacttattgtttctttggcactaagtgttggcacacaaatggtaagtgtattgctattacttatggaacagaaatgagatctgagatttcacagttcccttgttactgaccctagaaacctttgactgcaacttctctgcctttttttcctgtccctgatagaaaacatttaaagatgaagaactctttccacttcaagtagtcatgaaaaaactggatcttattagtgaacttagagaacggtaagtaggactgggatatgctgtggtactccaaagacagggttaatagaaacattgattttctttttagcatagcaagagaagaaataaaattcagatcgagcattagttcctttctgtaacttctttagcatgaccaaaatgagattgtgactagggatcatatttatttagctttgcttctacaggaagcatgtagcccctagaaaaactcacatgagaaaaagcagtgcaacctcagagcatctggccgactttgatgcatatcgtgattattatgttgggtatctttattggacttaaattgctgtattataacagggcttcctctatttgtgtgagacttagcaatccatgatacgtagtgttctatgattttattttaagacacgaatttgaattaacattgttgaattagtttttggaaggcttatttttgtagctccttctggctttcttgttttctttttgttgagtaagcgtaaatttcttgaagggaaatttgaattttggtttccagctgaattaaggttacagcacaatttccatttagtattcatatttataacttacttttttgttgttctggagaagctgacatttttcttgttattggcatttaattttccactcttggaagaaatattgagcctttttcattataagatagttaatgatcattctgttgccctttaaggtgtgaaatagtcacttggcaaagattgtagacatgttaagtgtgggtttttttttggggcggggggggtcacaattttttttttttaaaagatttttctttccaacttagagtcagggaaaatggagcatgtgatgcaagtatttaagtctagtcatagcaaataatattgaaaatgagtttgtttttatttaccaaaaccaaaaatggtcaataaatgtttattttaaactctgatatttgaatattatgcatatcatttttcaagtatggtttacaaaagcatatgtgcagaattctgacaatgtcaggcattggagtgtttgttacctttgtttcattttgatagtatttcttttgtgacttttctatactatgttgggttaagtgatgtagggaatgcgaactgtgtaagatggaactcttccttctgtagtagatgtcattcctttcatattgttttgggattcttcagttttggtgtgactgattactactttacattgtagagtccaaacacaatgtgactgttgttttttatactggcatcgagctgtcttcccaatttatttagatgatgtatatgaaaatgctgttgatgcagccagattacatgtaagtaaagaacaatataaagaataattctatcattttaaaagtcactgtgtaaaccgttttagtttaaaatagatcatttgatttaataaacttttaaaattgactgttttgtaaactgcatattcataaagtgtttatagtctgtagttaaattttatgttactgttaacgaagttaatttatttaatttcttccttcatgttcctaatcattttcatttcacttaattttagtttatgtcatagtaatctgacatttactcatcagcaaattacaatgcaaaagaaaaaatatttttaagaaatattcatatttttctttatggaaataagtgtgtttaaatgcacaagataggaaaggactagcgaatgtgattttttttgggtatatttagttaaagtatatgctttaggttctttttctttaggaaagttaagacagttgtggaaaatcatttttccttcagatcgaggttttgtctttcaagataattaacttttgcagtattgtttagattagagacctggtttttctaaattcatgtacattttaattttcttcttagtacatgttcagtgctttgcgcgactgtgtacctgctatgatgcatgcaaggcatttagagtcctatgagatacttctggattgctatgacaaggaaattatggaaattttaaatgaggtaacatcatatttgagattgaaaagcttaaaacatgtttggaatgtagtgtttggaaaaaaaatgttcgattgaagcagactcactgagttaaaattatttataaattgctgggtagaacaaagaactatttttagttacaatatcactgttgtgctaattggtctgtaattcatttatttagaaatcacactaggaattaggagattttaaatttacttttgtaaatagatattttaatttaaagttgtttattagaagaatgcaaatgtgaaatggttttgaatgttgaaagctgctaatggtccagttaaagcaacttaaccattaatattttactgaattttatttgcagagctcctgagagaaggaaattatatatttaaaagatttagtgtgtaacaaaagtaatttgaatccaatatgtatgcccctccttttgttaaggaaatatgtattataaacactgatatctttaaaattaaatttccatttagtgatatttttatttggagggaggaattaaaaatgaggaaatttcacaatataatcctacctgggtttgatgaaattgtgaaaaactttttataatttcttgtattacgtattcttatttaggaaataaaatacatgcctggatagtaatttagaactccttggtagaccagaaaagatgattaattttattacctttagcacaatgaattttgtgattttttttttaacagttattacaaggaagcttttttcttttctctcttgcctgttctcatgccctttcctcctttgttgctggtttccataaattttatgctttaagttgcatattcatgttccttatgatggtaccatcaatcattagttttagattttcttttcaagagtattaaccttaaggtattggtgaaaataaagacttagaatttatgtaactgcttctgaccaaaaaactattggtttaaaatggagcatagacatgtagggaaacaatacaattgcaatatcattttgaaaaattaaagtatcaaatcttttgtgaatagcatttgctggacaaattatgcaaagaaatagagaaagatctgcgactttctgtgcatactcatttaaagctggatgaccgaaaccctttcaaagttggcatgaaagacctggctctttttttctctctgaatccaattcggtttttcaatcgtttcattgacattcggggtgagtgttttgctttccttcttagagtcatattctcttttttttttttttttaccctactgttaaacaaaactttgagggtatatttaaattttgtgttgttattctttaattacattttgtttcttttctcatttttattaataccttattttaaaggaacaaatctgatgttcaaggacaagttgttgttttttccttttaggtttcatttcttttccttttctactgtttcacaagttgaattttttttttttggtagcttacgtaactcactacctagacaagactttctacaatctaacaactgtagcccttcatgactgggccacttatagtgagatgagaaacttagctactcagcgttatggactggttatgacagaggcacatcttcccagtcagactttggaacaggtatagtataaaatgttttttttagcatactgtgactgttggctgtaacagtactttttaaggaagtcttttttctttttgctttagttagtatgtgcttattttttaagaaattatttgccatataaaatcttatacttgacaacagtaaaaaattaggtgctgctaaattgctttataaaggaatttaccaccggggtcctgcttatattcagccttctgttgagcattcgagatatacatatatatttatatttatatacagcttttcagaaacactagaatagtgaagtgacttctgtagaattttaagaagttcaaagtcacatttaaggattttaagcctggttatagtatataaaatttagtatcttaggaaaaatggttaaatttacatgattacaaatgtgttttttgttcttaaaatgaggagtataggaaaacatttagctttgctaattcaattagttaatgtacagtatggcattgtctcatgaatgtaataatttatgttatcagataatttgcgtggagttctctttaagatgatccagataatatttaccaaaaaacatttattcagttctaaaatttgaggattctagttttccctttatcttgctgcatgtagggattatttctaggatcagtttgtatatcctttcatttattttgtatatcctttcatttattcatttatatatctgatatttattgagaacatgctaggcactgaactatgtttaggaatacaaagataaatataaatagtcccagctcatgtaatatcctctgggagaaaaaatgtgtaaacaaatttttagattagaatatgataaaagttataataaaaacttaaaaaggtattgtgatgctcctttgagctctaattagaaaaaactatggaacagtttatatgataccattgggtgttagagtaatatctatttaaagaatgaaggattcttaatagaaaacttgtactatttaaaaggggtctggtgtgatcaaaagaagcataacagtttggaattagactttctaaagtcccaaggccctgctgctgcctagctattttgcctcagagaacaacttccttagcttcttttttgtcacctgtggaatttagaagaatgatacctcatattttagaattacatataaggaaccttgcaaagtacctgaaaaatagtatgtattttatgaatgtcacagcacattctgactaccttttagaatctggctactagtttactttgtagaaaaaatgtagagaagattgttgaagagacaaatattctcaaggctggtggggagatgactgtgggtcatggatcttttaatatttaaacttaactgttcctgtctgcacaaaagataaagtaataagcagccaggtttccctaaggagatagtcttgatttgtcttttaacgtttgatcgtaccttttatatagttctttaaaataacttaaaaattattaggaaacagtataatcaataagtcattatgctgatacaagtttaactgattattttaatgaattataataaaacttgtatgtgtattatgttgtagggccttgatgttttagaaattatgagaaacattcatatatttgtgtcccgatacctctataatctcaacaatcaggtgagtagggtttataaattttttttttttaatgtaggtggagatagttggaaggctgaggggcaaggaattgatttttatgggtgaaaattaaatgaaacaaaaaataattgttttcgaggccttgtttatttttttgccttgattataccagttgtgtatcttttattcgaaatgtttaggacaagaagtgttttggatttcagatttttttttggattttggaatattcgtatcatataccacttgaggatccctaatctgaaaatccaaaatctgaaatgctccagaatcgtaaacttctgaccaccaacatgacgctcaaaggaaacgctcattggaacattttggatttcagattttcggattaaggatactcacctgtactgtcttgattgcattttcaattaaattgtctttaatgaaatagattctaaaattttctttggatacctgtttgaccagtgtttgctatgggttgcgttgttactgagcataaatttgtttcattgcagatttttattgaacgaacaagcaataacaagcatttgaatactattaatattcggcatattgctaattcaattcgaacacatggcacgggaattatgaatacaactgtaagaacttttctttgggggttgagtgggtaatagacccgtttaatagcttggaacgtggttttctcatagaatattgcggtaaacatacactactagtttatattttacatgaatttccattttttttctggttagtaattaaaatgtctggtcctaaaattgtgttggatgtgatgggagctgtgatacaaaagacactttagggtagattaccatctcagagccatcattataaatagtgctagatatttgaggacatcagcacattaatatatgtgtgtgcacacatatatatatgtttatctgtgttgatctgtgatccctgaaagtttacttttgaaagtcaacaatagatagtaatttacttaatgttatttatgccctttttggggcagggtttgctaattatttgatgtccatataaataggaacttactaaaaatatattgaatcttcttagaaatgggcattcaccgcttggcgtggtggctcacgcttgtaatcccagcactttgggaggctgaagcaggaggatcacctgaggttgggagttcaagaccagcctgaccaacatggagaaaccccatctctactaaaaatacaaaattagccaggcgtggtggcgggcgcctgtaatcccagctgcttgggaggctgaggcaggagaatcgcttgaacctgggaggcagaggttgcagtgagctgagattgcgccattgcactccagcttgggcagcaagagcgaaactccatctcaaaaaaaaaaaaacaaacaaaaacgaaatgggcattcacttgaaggaattatttgaactcgtatgctatttttctgtctgtggaaaaagagaagtctttgaatttacctggttttcagagcacagttaatttctcctttaggggagaagactgaatgcttaagtagtacagtattattaaacacatttggagtagggaattgggagaaaatggaaagttaagttgggatcatttaagtatacagtggaaaagcattgaagattttgagccaatgagtgatatgattggagctccattatagtggggttatcaatatagaaatgaaacatacaattttaaattccaaatgaagagtcatccatgtaatgatcatgtttgtacctttgaggataaataaaactgaacttttgagagtaaactcttccttgacttctatcatctatcaaatattcatgtaacagatgtgaatgtattttatgtgtcagggactgtgctgggcactagtgtgagaaaaacacatttcctgctttcacagtaatcacagggatatagatgttcatcagttaattacactaatgaatgtagattactgatgtctgttgatgaaatgagcatagaaggatagaaatcaggatggcagaatagttacccactattaagagtggaaaggattaaaaacaaaagactgttaaagagatttttttaaaaatgcaaagaaacagaaaaaacaaggagagagtacaatgtttaagctacaagataagttcccgaaaatcatttgtttccataattgggtaaatgaatactgagtaaaacgggcacaaatttgtcaaaatcattagtaatacttgagagttagtggggttggaaatgaatttagggttttcatttgtaggttggaattaatcttatgctatttctgcctgtaggttggaattaatcttttgctatttccatctgtaggttagaattaattttactgtgctattttgactttaatctcagctcatacctcactttcttaggattttctgagtcaagggctttttgttatttattgtcaaagcacacatgtacttaacattctgagaaattattacagtagagatttaataatttatttaacaatacttgtttaaaatgtttgtcacctgttctagaatataaacttcgtgaagacaaggaccatgtctagcatgggagaaggcacgttgccttgtgtgtaagaggtgattagaaatatttatggatagataattgaatatgtggtatcttcaggaaggttcagagaacaccatgtttcttactttagtatcattctagacctgtagattagcaataagtaatcttactgatggaggaacatagaaacttctcactggaccatggcttaaaaactagagtcttgagtctggttttgtgattctcactacagcccttagtcctatcatgagaatattttccacttttttcttttcttttttcttttttagtaaaaatatgtaagaggagcttatagaaagttttgtgaacttcagcaataaaaaatgttatttaaatattttcaggtccaatatgaaatagactttttaaatagtactttataggtagtacaaatagataactgtgatacagtaaaatttatttgaattgatttgaattaatttttatattaacttttttcaactttttgaattttaattttataggttaatttcacctaccagtttttgaaaaagaagttctatatatttagccaatttatgtatgatgaacacatcaaatccagattgattaaagatattcgatttttcagggaaattaaggaccaaaatgatcataaggtaggctacctattctttttaaggtatttgattaagctattgagtatatggcaaatgtgtatgctaaaattcattatttagatctctattggggttttagttttattttccctataatttcttactctgcattatctgtaggcttaaggtaaggaaaaaattaaatcataaatgtagccaggtgatactttttctttattttaaaataatataaaagcaggacatgcttattttgaaacatttaagcaatatagaatggataaactgaatatccaccttcatttctctttccattccattttctggaggcagttgctaacaatgtagtgtgatggctttcagatatctttgtatataaacatgtatatttacacacatatattgcttttaaaagcagtatagtaaaaatggagtaatattatacatagcattttgcactgtgctcatcacgtcagtacatacagatctgcttcaagttgatagggatacatccatgtatatcataacttatttaaccttcttctgttgaccattatttaggtttttctaatttttcattcttacaaacagtgctgcagtaacatctttacacatctatctctgtaaatctcagactttctgaaaacttccttaaggagaaatttctaggacaaggaaatgtgaacatttaaaattgtggtacatattgcctagcactccaaaaacacttcactattgatattcccactgataatttatacgaatgctgctgttagcagggtgcagtggctcatgcctgtaatccagcactttgagaggctaagataggtagatcacttgaggcaaagcatttgagaccagcgtgggcaacatggcgaaacctcatctctactaataataccaaaattagccgggcatggtggcacatgcctgaagtctcagatgctcaggaggctgagtgtattagtctattctcatgctgctatgaagaaatacctgtgactgggtaatttataaaggaaagaggtttaattgactcacagttctgcatggctggggaggcctcaggaaacttataatcatggcggaaggtacctcttcacagggtgacgggaaagaatgagtgcccagcgaagcgggaagcccttacaaccatcagatcttgtgagaactaactcactatcatgagaacagggtaggggaaactgcccccatgattcagttatctccacctggtccctctcaggacatgtggggattatgggaactataattcaagatgagatttgggtggggacaaagccaagctatatcactgaggcacaagaatcacttgaacctaggaggtggaggttgcagtgagccgagataatgccactgctctccagcctgagtgacaagagcaagactctgtctcaaaaaaaaaaaaaaaaaaaaaaaaagaacgccgttttcctttcaccttccaggctgagttttcccatagtgaagtgaagtgaagaatctgttgaattgttaagtggcagcaggcgcatgtagccatgtggattgagaaccaacaggcttagatgggtcctatatttgatttgccatatgcggaactattttaattacttttcttaagatacacctatttccagttctcttgtataatggttgctagttctcttcagtgccagagtagcaaaatattactttctcataggataatctaataaaattacagattacatttatcagtagaggattgtattaactcttttttttttttgagactgagtctggctctgtctcccaggctggagtgcagtggcacagtctcagctcactgcagcctccgcctcttgggttcaagcgattctcctgcctcagccccctgagtagctgggattaaaggtgcacaccaccacacccagctaattttagtatttttagtagagatggggtttcaccatattggtcagactggtcttggactcctgacctagtgatctgcctgcctcggcctcccaaagtgctgggattacaggcatgagccactgtgcccagcccagctcatttttattggagcagaaattcctagtatttagagataaatattcatgctattatgtaagaattgctttcttattattacaaaatgaataatttcctaaatctcctaatcaaccaagaccaaaaagtagtttttttattggtgatggttactagaaattttaacccagctgacgtgtgttcattgagaaggagtatgtttctaagtccctaatacctattcagcccacagaaacttggtcacacatctgtgaacaggtgtttctgggaggaattggtttcttttttctgttagagttgttggaggttaggagactaataattgtggtagggaaattaggttagtggcattgattattagtcgttttagctaatgtcaaaaagaaaaaagttatattgaccttgaacattggtagtgtatgaattattaatcttaattaatttttaagcacaatgaaatacaaaattgaaaggagagtagtattggcatggtttatttgggaggcattttgtgctttagaaatctttattaaaagtagccttaaaattttctgtctagtatccttttgatagagcagaaaaattcaatcgaggcatcagaaaacttggagtaacacctgagggacagagctaccttgatcaattcaggcaactcatcagccagattggtaagttatgataaaagtgttgggaaatcaggtacagatccctacagtctatctcatatattaactatttcacactaataagcagctcatgtgaaagcctgagctcagctttactccactcatgtaatttttttacccccaaaatttgtaagtatgattagactgttgctgcagaaataattgatagactataggctaatcacgtaaataaaacctcttcaattataattaaagttatttaataactaaatctcaaaggtcatattaataattgtaaactggtaagtacttactgaatacctgctctgttcaaggcactgttttgggcttctaaaaggctcccacaagttccagtctaaatgtgaaggtataaaatatttacatgaaaagttattaagttctatgttacaccattttacttgtgcatataatgtattgtccttctgcccttacgagtggaacttgtcttctgatatgtagtacttttatatttaaaagtaagaactacatttcataatcatcgcttaacaaaactttatacttatttgagcttttcacatacattatatgttcacaataaccctgtgagataggcatgtaatcgttttaaagatgaaaaaagagaaacttagagaaagaagtaagtcatgtttctgggacttaaaccagggttatttagctataagtccaaatgggttttatattcttgaaagtttatattaacaccaaacagtaaaatcttattgactatattttgggaaaattctgccttgtgagattgatttattcatttatcaagcatttactaagcatctgttatgccacattttctgttaggtgctgggaataccaacccctttgctttcaggagactttaggtttactagtgggtaatacgttataagcatttcattctggagtaaagttttttcagttaattgatttgcatattagacatttctattatgttttagtacaagaacttggaggattttacctttgtaaatgttttattataaaccattcaatattaagtattgtcaaataagtacaaataagttttcttcaagtggacatttaatattaagcggcaaacttatggagcaatagttcttaaccttttttgagaatctgaggaaaactccaggatgattgttccagaactaatgcctatatgacatacgtacacaattttgtgtatgatatgctagagtccatgtgcttaaagcttgggtctatggacctcagattaagagctgtccttctagagcagtgttacttaagttttatttatacacatacccagaatttttgcatcctgttaatactgccttcactattgttacatgtttttattttttttgagagtataatttttccttagaaataacagttgttaaatcatagtccttaaaatgctagtcatttttgccctaaatacataatcactaagtgttctttggtgtgccatctaatgtcaccttgcttaccaccaggttgcagtccacaattggggaatattatccttttcattttaatccatcgttttactctttattctcttcttagaaaatataaattctttttttttttttttgagacagagtcttgctctgtcacccaggctggagtgcagtggcatgttctcagctcactgcaacctgtgcctcctaggttcaagcgattctcccgcctcagcctccttagtatatgggacttcaggtgcatgccaccacgtccagccaagttttgtatttttagtagagatagggtttcaccatgttggccagggtggtctcgatctcctgacctcgtgatccatccgcctctgtgtcccaaagtgctgggattacaggcgtgagccactgcgcccggccaatacaaattctttacctctgcttataaaacactgtaatgtgcttttgagtctgataaatatcttgagaaaaggtgtaaagaatctgggagcaaaatggaagcctttttgactaataacttgcctgctgaaataataataattaacatttattgagcatttactgtgccatggctattcttagtgctttatatgttttaactcacgtgaatcttaccacaacatttatgaaatatttcttcccttcattcactgcacaggtattcattcagtacaacaaatgtttctaggtgctgatgatatttatgacagtaaacaaagtctctgtccttattgagcttaatttaccagatgagaagactgagatacagagaggtaacataacataatttgtaggtctcttagctaacatgtgggagaccagatttgaacccaggtggcctggcttcagagcttttactcttaattgccgctctatactaggctctcctattttgcttcctcagactttggtctgatgatttggaggaaaacaaacttgtcatttgactttttaaagatgcacattaaaaaaatttcaatgtcatttctcatattgggacaggccttaaaatagattcaatgttaactgctatgtagggttgttaaaaacataagataatgtatgtaaaatgtatgttactcatgattatgaaatgttaacttgtttttacatttccgtctgttctttcaagtaatttcaataaagttcaattataaattgaattcctactatttgccaggacatgttggctctagggatggagcagtgaagaagacaaaggctgtactcatggatcttgaactctaggtgggggaagatgcagacagaaaaatacatagtatgtcagtgataagtactgggtaaggagatgtaagggggctgggcagtgctagtcagtgatgttcagggaaaacaggaggtgacatttgagcagggacctaaataaggttggggagtaagccacgtgcatctggggaaagagtctaccagacagaggcaacagtaagtgcaaaagccctgattcgttcacatttttgagaaataggggctggaatggagtgagcaaagatctaagtggcagggcatgctatctgaacagtagcagaggggtgcaagatcgatgtcaggattttgattactgagggtggaaagccattacagcattttcagaaaaagcatgatatggggccgggcatgtgtggctcacacactgtaatcccagcactttgggaggccgaggtgggtggatcacctcaggtcaggagttcaagaccagcctggccaacatggtgaaaccccatctctactaaaaatacaaaaattagccgggcgtggtggcggacgccatgtgatcacagctacttgggaggctgaggcaggagaatcgcttgaactgcagaggcggaggttgcagtgagctgagatcataccactgtactccatcctgggtgacagagtgagactctgtctcaaaaaaaagaaaaagcactatacgctctaacttagtttttaaaaattcactagcagctctgtagatattatacaacactggggaatgtggcaggatgctaaaggtgaaagtagggaaatcaggaggccattgcatattgcagtgctccagccaagagctggtgatggattggataggaggatatctatgaaggggtgaatgaaaagtgggtggattctggctacgttttcaaggcaaagtcaatataatttgcccagtcattttgattataaaatgtgagagaaaggagccagggatgactttaagacatttggcttgagcaactgaaaggatagaattgccagtttctttgataggcaaaattggggataaagatcctgagcttgagttggacatatgaaatataaaattcttattagacataaaagtgtaggcatcggataaaaaaacctagagttcagaggaagagtccaggccagagatataaatttgggaggcatcaaataaagatttcttgatatcacttccaattgtgtatgtggcggagattgaatctcaatgtgagaggagaaattattgatattataattttaagcttgaccattttaatgtagtcagcatttaatgattttagtttatcaaatgaaaataacatttacttttaaatatttaatatagttatatataagtatgtatgtttatattttaagtgtagaaatatgtaacagttttactttttatgataagaactgaagtaaaatatagcaaaatattttggttcttaggagtggaaaccttgtaatttactactgtatgtaactatattcctattagaatttagagttatttatataaatatctgatttttttgtgtggtttttaaggtaatgctatgggctatgtacgaatgataagatctggtggtcttcattgtagcagcaatgccattaggtatggatgcaaacatcatttttgccttgtttatgccattttaaaaattgtgtccattaaatatatgttacaagtgatattgtagataaggtgtttgttcttgatatattttgagataaaatatggaagaaaactattaattctactagatttttctcaaattttaagactgcagcagacttctgaaaatatttctcttaagttaatttatcaatatggtttatgaatgcatgtaaagattacatgattttaaggattaaaatattcatatctaaaattcaatttggaactaaagtggtgatatgaataatattactgaaatgcacagttgtttccaaatacatagttgaaaattttagagtcctgcagtaccacttttatatctgtgtcaattgcacatattttacttgacctaataaatgccttcccaaattcttatgtagatttgttcctgatcttgaagatattgtaaattttgaagaactagtaaaagaagaaggtcttgcagaagaaacattaaaagcagcaaggtaatctaaatttggaaatataaaaaagtgtgtttataaaaaacattctgaagagaagaccagagggtaatatgtaatttttatgccactgtttttattatacaaaattatggcctcagtttatgaagtataatttttaagacttcagtattctaagacctttccagcttctagaacatgctgtccagtatttcagccactagccacacatggctcttgagcacctaaaatttggctggtccacactgagatgtgctcaagtataaagtacataactaaccttgaagatttagtataaaaggaggaatgccaaatacctcaatcataaaattcatttcacctattttctttttactttttaaaatatttctcttcaccaacagtgttctagaatgccagtcctttcttatatgtaatctatagcagcactgtagccactaccatatatggccggtaaacacttaaaatatggcaaatgcgactggggaattgaagtgtaaattttatcttaatttaaatttaaatagctaatgtctgtcttattgaacagtgcaggacttgagtcagttgtgcatttgtcccataacacgagaggcatgcagaattggtaagaatatgtttagaaaactgtatgttttattcacacttatagcaggttattgaatcaggcatgaaggggcacccctgggcaagggggagacaatttgatcaaaaagaataatgatagataaaaatctgttgaataaaaaaaatcaatgagtcataatgataagaagggttatcataagaagatcataatgataagagaatgaaagtcatttctttatggaagaatgcttgttaaatttaggggggaaattgtaaccatcactgtaatacttgaaatcaagcaagaatccccagtggtttctaaaacattaggtgaaaagtttttagagaacagaggattcattcagtaattcatcccataaaattgcttattaattacaaaggagaaaactgtctttacagtggagaaatatattccaccttggccaagtgatcaaacttagcatcaccagtaatggagcagacagatgtaatgtggcctcttgatgcaatgtaatgtcaagtacctagtttgtattcttgccagaaatgtttatcctgaatttattaggaggaaatgtcctgaaaaatttagaatgtgagcattttatgaaacacttggcctggacaaaaaatacacggagattgttctagattaggagaataaagagacctgataatcacatgtaatgggtgatacttaatcatatcctagataaggaaagaaacagctgtaaaggacatttgaggaataattgggggacatttgaacatggattgtatattagttaatactgtattatattcttgggtataacagtgttttgtggctttgtagaaaaatgttttcattcttaatagattcatgctaaagcattaatgggctaagtgataaaaggtccacaactttcaagtgtttcagaaaaatagagaaaacagttgtgtcaaaatgttaacaagtggtgaatctagttgaagggtatacgggtgttcattatactatattttaactttttgataggcttgaaatcttaaaaaataaaaaagtatatgggaaaatgcatgcatttctgtgagaataaggccccagcacagaagctttgctctggaatagtctgttagatagcttaagctctttgccagattacataagccatttacaaagttaagccatttgaagtcatgtgcctgaaaatggtttaaatagtttctgatgtgtgtctcaaaggaaaggatcagacctttaccttatgttaaatgatgccattcactccgaaagtgttgaccatttaaaaaatattttgaagcagtgtgaggaaatcagagagtaggatattgtcttctaagatctctagggtaaagctgactgctagttggaagatccagattggtgcaagggagtggttgattgaagtcaaggaaatgtagggtcatgataatgaatagattatctgcatagacaggggagaactggagcaggcatcctaatcctgcgtaattgtaggacggtggttaaaaggttagtagatgtctgctgttaggaagaagtagttgagtatttgggtagttagatatagttggattatgtgagtcacaaaggaagatttctttcttacagtggtggaggaataataattgaaagtggtagtagctgtacatgagggatgcaggagaaaaagcagctgatgtttttgaaggttgagagggaaactgagttcttgaaaaaaagagccaggtttatgttgaggtaaggggatgtaggagaaacgttagagatttaaggggaagaggaaatatttacaatgaagaggagttctacaggcctcactgtgggaagaagaaatacagaactattattttaagtcccaagatgttctaatagtctatttttgggactaaatttactaatattgatcagttttctgtccatgagaaaataagtttattctgaactccaagaaaattttcttagaagtgtcttacagtgtttcctgcttttcaagtgttcttatctaaactattgagagatggatttttttcaaagccacgcttcttttgagaaaggaaccaaataattttttgctttttaggcatttggattcagtcctcagtgatcacacacgaaattctgccgaaggcacagaatatttcaaaatgcttgtagacgtttttgctccagaatttcgaaggccaaagaatatacatctccgaaatttctatataattgttccccctctggtgagtatttccagaacctaaaatgaattttttttttaaaaagagtatgcacaaatagatctggtttctttgtaacacgaaatgcatacagactacactattaatttcctggttgcatataaaactaaatgtgatctcagtgaatgtgacatagaattttttatttgttagccatgctgaaggacactttcttattgttaaattttttttttcttctgagatggggtcttgccctgtcacccaggctggagtgcagtggtgtgatcatggcttactcaggcttgacctcctgggctcaagccagccccctgcctcagcctccctagtagctgggactacaggtgtgcaccaccatgcctaattttggtaatttgttttcttttttaagatatggggtctcactgtgtagcctaagctggtcttgaactcctgggctcaagcagtcctcttgccttggcctcccaaagtgctgagattacaggcatgagccaccacgtatggcctaagatagattcttattttttttaaataattactggagaaatttgagtattttttaagttatatgagtatatgccatagaatctttgggcagaattattaatatataatcattttaagtgcttaatgtagaataactttagctgttattatagttttttctaacacatttcttaaagcatattgtttcaagataacttctttctattcagtagtaaatactaacatctggactaaatttttaatgcttcttagagtatgtaacgtgttcttgctctaactctgtagttgctatctaaaaatagttcaagttatcaaaaattgcattataaaaacagctgttccattagggaaaatggagttaagaatttttgagaggtatatattagtaataagagttgttttggcttaaggttcctataaagtttaaaaaaaattgtaagtagatagctttaaaatctaaatatcacccagcagatgaagctctttattatatttaattttgatcaagaatagtgacttttcatattgctgcccaagttgttaacacatcttcttacatattaaaaccattattacctattgaaagtagctaatagcctataaacagcttttttccatgaattttgtttcttttatacatttgttaattttctatcataattgtattttaactatgatatagcaaaaaatgttcatattcatcttgtaagaatcttttcatcttaagatagtgtcaaactggagggagagtgtcatatttggtaatactatagttaacttggggtgagttctcaccatatttttttaatttgaagggcaatgtactcaaaccattgtagacagcagttaacccattggtaagcttaggaaaaagtctggagttttacaaggcagttgtcagaattcgcttagtgatggagaaaacaaagtggattaaaagcactacaaagaagtatagaatactgttcttgtacttgtgtttgtagtgtagttccagaaaaaagacaagcataaatgagatttctaaaaaagattgaattaatgattgataaaaaattcacaaacaggtgattaattgctgaataagtttcacagtcaaaaaaatgaaacttggttttgtttccagcgtaggctattatagtacttagcacactgtatatcataattagtttttaaacacttctgcatttactcttctagagctgtgctatccatgtatagtcacatgtggctacttaagttaattaaaatttcataaaattaaaatcataaggcagggcgaaaaaaataaaaatacctttttaaaaattaaaaattcagcttgtcagtcacactagcctcatttcaagtgctcagtggccgcttgtgattagtggcttactgtatgtactggatggtgcagatacacatttctgtccctgccaacagtgttgctctagactgtgaactctagatagaaatcatttgtttaatcataagtacttaataatgcctggtatattgtaagcttcagtaaatctttgttgaataaaagatatgattagataagtcattttggaagagctgaattttcaagagacgtactgttttgaggattcacacttaagaacatgaaaagaaatagtattttcgaatgaattaggtaggtgtaagtaaggactgtcttgcatatgtttttaagagtacttgtgctttgaaataaagcaggcctactttgctaactccagcattcacttaatatatgactttgggtgagataataaatctcccaagcctcggtgtccttctctgtaaaatgtgcataatattttataatgagatatacaaggcactgttcttgggctaagtagtgattgagggagtgcccatatttaaaggacttggaaaggagatccatgaagatacacttgtatagattgtatcttcaccaagagggtacctaaggcaaatgtttcagatgaaaaggacaggaatctagattctattctattctatttatagtgattctatttataatttttaaaatgtctgttataggaattctgaagattttcttagcaaaattgtttttctaacatgttgttacatctttttagaccctcaactttgtagagcattccattagttgcaaggaaaaattaaataaaaaaaataaaattggagctgcctttactgatgatggctttgccatgggtaagcttaatggaattgtttttccattaattttatattgaccttgtaatggattcttagaaacatctgcttgagaataggtctatatgttctttatagatttttctttcttttttcttttttatttttttgagacagagtctcgtctcgctctgttgcccaggctggagtgcagtggcacgatcactgcaagctccgcctcctgggttcacaccattctcctgcctcagcctcccgagtagctgggactacaggcactcgccaccacacctgcctaattttttttgcatttttagtagagacggggtttcactgtgttagccaggatggtctcgatctcctgacctcgtgatctgcccgccgcagcctcccaaagtgctgggattacaggcatgagccaccatgcccggcctatagatttgtttttcatgagtgttgtttaccgtgtttttagctggaatacatgattgacgatacttgttttctgtagtttataacttattgaatgccttcttagtattgctaatcacttgtccactttggcctaatatttaggctttgtttttgttggggttgtacagttttaacgtcttatatttagtttctctggtttccttgtagcttcctcaattgccatctttttagcagttgaagtgtttttttcctttctttttgaggcagggtcttgctctgtcacccaggctggagtgcagtggtgcagtcatggttcactgcagcctcgacctcctggacccaagcgatcctcccacctcagcctcccgagtagctgagactacaggcatgcatcgccacatctggctaattaaaaaaatttttgttttttttagagacaggagtctcactgtgttgcccaggttggtcttaaactcctgggctcaagaggtcctctagcctcagcctcccaaagtattgggattataggtacaagtcatggaaagttttattctttatgcttacagctatatcgtttctcctggtgatttatatggccatgttagttatttattttcttcttaattgacttgtctttagttatacttctacattgtttttaaaggaggaattaagccattttgttaaacccatcattcatttatgctgtaaaatgtaacttgaaacgggacaaacttaaaatgctaggaattattactcagaatgcttagtgttgggaattattggtgaaggagtagaataccacttctgtactcactgtaatttaaccttagttttgcttatgcctgcaggtgtggcttacattctaaagcttttggatcagtatcgggagtttgattcacttcactggttccagtctgttagagagaaatacctgaaggagataagagcagttgctaagcaacagaatgtacagtcagccagtcaagatgaaaaactcttacaaaccatgaatctcactcagaagcgactggatgtctatctacaggtagagaggagcctaagagtcacatctgctttgacttaccatttgatatccatgacttcttaatgtctgaaaagcagaagccatatagaaactaccattttcacaagtgagatgaatagtggcaaaaagattatattttaaaatgagtgctatttggaagccatttgactcacatcttaaaaatgggcgggttacttatttcagtttctgtatttatgatttccactagagcttttaaaaataataataagaggcataaaaatgcatatatttttggtattttgccataataagtatttttggtttttatttcaaatttttaaatttacttaggaatttgaattgctgtatttctcactgagcagtgcaagaattttcttcagagcagacaagactgcggctgaagaaaaccaagaaaagaaagagaaggaaggtcagtgagtggtttaaatttggaaagaccaataaatgtctttagtaatagacagtaatgcaccattttatctggtcagacatctagcttctttgtccttttggaaaataacacagacctagcattaagtcttttaaaaaaagtaaagcctgtatagatcttgtgtgaaattgaaaaggaatttatgtagtttatgcatttcacacttggtaaccctttaaaaccttgttcaggatcatctgcttttaatttaaatacacttttcacaagtttggtttttctttcatggctcaaactattagatttgaaggaacaaatagaggaggacagctaaatgttgctgaaggcagagctgctgatgactagatgttgactgaatgagatgggacagatgattaaagaactgtaaaatcataggggctatttagttgtagtaaatagcatcctgccttctttcatagtcaggccctggagactcaggcaatatagccataataactgatagtgatttcaatgaacttcagtcattaaggaaaggattctgtccattgtattctatgtaggatggtggaaaggaatctatactttttaaggcgtaagagcattgttcagtgtttcatatttaatgtccccatgatatatttctctcagatttgaaatttaggaataatcatcttctctgagaaacagatgtttccctttttctgtcatggatattatatagcatacatttctcattgcttggaagatcaaaactagatacagcgactagttaacccttataattttcatgtttactagtctcctttttgtcttactcgtgcttcatgaagttttcataaatcaagatataaagctcttcataaaacaagatgtttttattaatcttattttatgttaatttttaaaatacaccttttttctttatatagagtagaggtgactcattgggtagaccacttacgtgaactaccttatttcttgacattgttgcataaattaaatattactaatattacttattaattaggtgcatatccaggcgttttttgaatctagactaaataaacatgcttgaaaaaattgtttcagcttattaatctggaagacactcaatattaaatgaaaatttatacatactacatttgtgttcattttcaaggataaattagcaaagccatttggaagaatttgaatcaatataatctaaattatgaagaaactcagttattgcctcagttctgctcatgtgtttcatgatgccagaaccttttccccagcccaggtgactgggaaaactctgcggggcgattggacatttgctttcaggctaaagcattaaaacaaaacaaacaacccttcagtctcatggcagtgggattccttgctttggcctattcctcttaaggaactctccagagttgcagttgttatgttatcactcacatcactgttctaagactatttcagctaaagattgctcagagatatagtcagtttctgaatacattactcaaatagtctttgtctgttaatgaaatatgcacacatgacattttgcacaaaaagccaggaattcattctgtcaaaaacagtgaaaagctgtttcatttaaaattattttaagaaataatatatattacgtataatttattataataagttataaatacaaatggaaagttattcattctggacagttttgatatgtgagtttgcagccatgttcctaccaggaatgacaatgtactgtaatggttctttcttggcccagctggaggaactggcgtgaggggagcgggcctttcttagaccaggaatatcaagattcctcaggacaaaggagcccatgtggtttgaagccccaccccaatacaggttctgagctccctcaactccaccttcattaaaaaccagtggaaacaattgcagtgtttagcctagatttttaaaaattttaaagtgtaaacaaggtataatttgtgatgttagagaaacatttgatggatgcaactgtaatttgaagtttggcaatacagctcttctcaaatttcttttacttcttaatttattgtttaaaaatgaacataaatatccattattattttcactcatgctttcagaagaaactaaaacaagcaatggagacctgtctgacagcactgtgtctgctgatcctgttgtgaaatgatacggatggtattcactgcacatatgatgaaatcatcagaattgttaaaacttttgccagtggaatggataaactattgatgaattgtttcctgggtcacatctctggaaaatagatgttacagttcttaaaggcagtgctttaaagtgaagttcattctgtttccaaaggctctactttcaaaggttaagaatgagattttaaaattggatttttgcctggacttgagggtacaagatgtttctatttgaagtgaagttataaaagggcaaatccagattcataaactatcacctcggatttcttgtaatctacatgtttgtaatttgtatttgcatagatctttgatctatagttatttcaagtcatgggaaattcaatgcatatactatatacagccagtaaatacatgcttaacaaaaggaatgagcctgaagttcataaagaatacatatcaatattcttataaaaggaatatatgaagatggctttgatactagaggtgaggcacaagtgttttatgtactctcagtgtacagtataactgatgatccttctttcattgttaatttcatgtgactcacaagagctgctgatgtctttgatgagacattttataactagtttacattgctttgagaacatttaacctccaacagctgctttaaatttaagatttacttaatactcagaaaattcagataaagccatagagtcctgtttgaagcttcacttctattttggttgaaggcatgatgtatgatgtcagaaaaaaaattgaatgaattatttctacatccaaactcaggtttcttctacattagattgaattgaaattttggtgatggtttgggtagactttttttttatatcaagtataatttaaaacatcagattaaataattacactgttcaggcttttaaaaaaataccactgtgagaataaagcgctagcaagatacatcacttactgattttaaaaatacagaaagattttgagtaaattttgtgcccagcaagctgttagttttatttttgtaaaggtatgtaagttattaaatggttaatcatggccttttaaaaataaaataaagtgatacctttacaatgaagacaaaagtttaaaactttctaatacaaacaccattttgggaaatgcttgatttttttctattgcatttgtctgctaaacatttctttggataaatcctgcaaatacttctaacattattctttgattccagcttttagaatgggtgtacaatgccctgtttgtacttactggttagggtcagggtaacttgccagcccaagataaatactttaattgttaaaagtcagaagagacagaatatgtaggaaatgttttttgtttattatgtaaacatggcttacagaattatgaacagtggatagattaaaggcatttaatatttgtaattcataataactgtagaaatggccctaaagcatgctgcataattaataatttatattttcattattataagtgtttatattaatgatcttgcatttgattatatcaaattcgtcatttcatagcaacagtattgttttctctgtttttcttctctaacttctctgaaatcatctcctattaagggatagaaattgttactagaagagaatcacatgttctgtgttcattatccctacacatgtaaattaattattttatcaatactagatagagttcacatgctgactccctggatacctacagttgagaagaaaatgacagacaattatttttcctttaggtcaaaataatgtcactgctatctggataaattataagttcatatatttgaaataagatcctggaaacgaatttaaatggtgtcaaactgcagagcaacagggcttcagtatattcacatctaataggttaatatgtacatttggatgatgatttttcttgataacattaacattaattttattttttcagacatactgtaatttaaaaattaatgtgagcgtttgttttaagttcacagaaaacttaataattcaaattctcaggaattaaggactcaccataacattgtcagttctaatgaaattttgtaaaagatggcaagtttgttacctcacttgagtggggttttccttttcccccaattctaagagaatataatgtgtatactaaaacattaataaacataattttgaaaatttc

SEQ ID NO: 14 - DNA, 84273 bp, Homo sapiens
gggacgcgcttgtgacccgccttccggaaggaagcggctaactatggcgaccgccacggagcagtgggttctggtggagatggtacaggcgctttacgaggtgggctccgcgccattagcggtccgcgaccacacccgggcccggggagggtgggaggacgcgtgtggatttgtggcctgagacctcggcgggactggctcggtcacgcccagactcggtgcctcttgctggaaggactgccgggagcttctagtcccagcggttgagtgtagggaggaacgggcgggggcgggggctgggactgagggtctcggtttgaattcttatgctccgggtcccctggaagctccggaaaggaacacgtgtaaggggacgcaggagacaggtctgcaaaaaccagagtttagacggacgataaaacggagtggtgaaaatgagtggaacaccttcgtctgggaaggtcctaaggaagtcagctctttggaactacggtacagttcgttggggaataaaattgtaataaattggagtttgtttttgtcgaaaagaaatcaagtgacttaggatttgtgaataaaaaatagtttgtcattcttctgcgtacatcagttttctgtcttataaagatacaactagtttagtcgatttttatttatttatttttgttttttttttttgagacggtgtttcgcacttgttgctcaagctggagtgcaagggcgtgatctcggctcactacaacctccgcctcccgggtttaagcgattctcctgcctcagcttcccaggtagctgagattacaggcatgtgccaccatgcccggccaattttgtatttttattagagacggggtttctgcatgttggtcaggctggtctcgaactcccgacctcaggtgatccgcccgccttggcctcccaaagtgctgggattataggcttgagccactgcacctggccgtagacttttaaaggaagaatagttaagagttttttgaagcctagttatttcagatacataagataataagaaaccagaatgtcaatcttagtgttcattcatttaataactgagagtccccgtgctgtcttgcagagctattcattgggcactgaagaacttattttattttattttattttttaaagacagggtttcactctgtcgcccaggctagagtgcagtggtgcgatcagctcactgctgcgttgacctcccagactcaagcgatcctcccacctcagactcccgagtagctgggaccacataccaccatgcccaactaatctttttttttttttaatagagacgggggcttgctgtgttgcccagcctggcctcgaactcctggcctcaagtaatcctcctgctttggcctcccaaagtgctgggattacaggcatgagctaccacacccagctgcaactgaatttttaatttaacttaaatagccacgtgtaacttagtgactgtccacattggaccacacagatctagatgctagggatagtgcggtgaacaaataggcagaagtccctgtgcttaaagagcttacattcatttcaagtgaatttcactttacttttgatgatttaatatcaccaaacttaatatcaccgtctactggtaggggtaatgacagtgtcttccattgcaggacatactgggaattttatcttgaaacagcagagacagcagatgtggctctgtcttatgctcatgtattaagtgatgcccagtattaggttaactgtagtgacctaaaatgagccactaaaattgaatgatcttttttataaatgattttttaaagaaatggattattttctgttaaatgttgtttgctccctttttgaagactgacagtagtgtaacttctcattccccgaaactgtccaacagtgagacttgggagaactcctgtatgtaacatttcctgggaaggaaaagaagtggtgtttgtgatttttattaattcactagagagagagtttctcagcttttcttagggtgatttctttttggagtgggctcttaactagtggctggggcagatgtttgcttgctagaatccaactattgagaaaactaaaagggtatttagacttattcataaatgaattgtatttagggggatgagcaaattttaaaattcatcataaacttcttactcccaaatcctatgcgtgttgaatgtagaatttgagtagtcttgtatagtgtacccaaaaaagaaccactgaaattaaataatccgatggttaatattgggattctgtgttagattttatttatttatttatttgagacggagttttgctcctgttgcccaggctggagtgcagtggtgtgatctcggctcaccacaacctccacctcctgggttcaagcgattctcctgcctcagcctcccaagtagctgggattacaggtatgcgccaccagacccagctaattttgtatttttaatagagacagggtttctccatgttggtcaggctggtctcaaactcccgccctcaggtgatctgcccaccttggcctcccaaagtgctgggattacaagtatgagccaccacgcctggcctagattttatttttttaattttaatttttattcccaaagaagttttaaaagctaaaaatattaggggtttttcatgtgagggagaaattgcctgctattagaaatggggaaaggaatgaatagaaattaagggagcttcgaaagtaaattgttaagaataggctaaaagtcacaggaggcagtatatgcaggtgtagtaaattttatgtgcaggtgttagaagtgtatgtttcatatcttacttgtttttgactcactcttaggctcctgcttaccatcttattttggaagggattctgatcctctggataatcagacttcttttctctaagacttacaaattacaagaacgatctgatcttacagtcaaggtacgaaattaaatctctgttttaattattgggtatgtgattatagttgctatgtctttccagaaaggatttgtggtggctcaaccatgtgtgttaaagcattttctgtaatgtaaggaaatcaaggggaatgaattattagggtaggcaaaatatggggaaatctagaaataaagtcagtacccaaatgaagaccatattatggtcttggatactttgctaggagtaaacagcagtcttgcaaatagatggttagagggaagcatgggcaactactggagtttgaatattcataagtgttgtgtgagttgctgcagaatagcacaactatttctgaagtatgggataaagattcccctgtggtcttcttaaaggagagtcagagtagaaaagaatcctactcatacccatctcaaattgaatttttatgtgtatggtaaatcaaaaaagaattctgagcatagaagttaaattttcataaattgtcaagtcacccacaaaactacatggaaaagaacctctagctctagtgataaggaaagaggcgagggtggttagtgcacaaaactcacaagtgattgtttttattctagccacaacgagacatggtatttctagcagtgtattcactgtgacttttgcattgcagcagacaattttgatattgccgaagttgaagtaaagtgactgcgcctgaaaagcttcagggggtttgaataaggatagctataataacaagtgctatgtggcttacggaggaatgagtgataagtgattttaaatcagtttgtcttagacaaatagagcttgttataactattcctcataaggatagtatgaggaaggggtaggatatatattctattagggggctgaggatgagggtaagtcatatgataccgtagcctcctaactactgagctggcaatagagacttctatgtgggctttagggagtcataggtgaagttcgtataggggtatttttactataaaagccataatacatgctagtcatataaggttgttagatcagaagtttaatagttcttgattagtaaacattattattaggatatttagtgaacctgagctatttcaggtgtggatgagtgtaataagtaagggaagggatcctactagtgtgtaaaataagtatgagcttgcattaggcattctggttggttacctcagcaggtaataatgattagggtagggatgagtgtagcttcgaaaagaatgtaaagtatgactagttctgtggctgtaaatgctgtaatttaaaaaagttgtaggaaaattaatttggaaatacggagtttttttccataagggtgattcattagataggtgatgttggcctgctaggattataagaggtagtagtcaggctgtttggattagaagaggtgatgttaatgcgtcagaagaaaaagttaatgagaagttagatgaattattgtttggttgattaaaaaataatagggtaatgaggctgatgaataggctatgagtagctatattcagactatagagtttttggagagttatattgtaacagtataattgttggaataataatttttggcattggagtaaatttagattttgtacatagtctaggccttatgcgttggagattgagactaggaaagcaaggcctactgcggctttgcaggcagcaaatactaagaggataatgggtattatgaatcctagagtgaaatgcatgtttaaaattatgagtgtatttatgataaatattgatagtatgatgccttctaggcataatagagatggtattaggtgggatcgatagattagtactcccagcagtgctatggtatatgctaatataatgttaatataaataaatggcatttggtaaatatggtctatcataatctaatgagtcgaaatcatttaatttaaactatttaccagttcaactcaatctaatcctttttgggttcattcataaattaggcctaggattagaatggtaattagtagaagggttgtactgattattagtataaggttatttgtttgaagggctcatggcaggggtaggaataggacgatttctaatcgaataggagaaatgtgatggctactagaaagaattttatggagaagaggaggtgggtagaggttaatggatcaaatctacattcataaaggctggatttttctatgtaagtattaagttatgcaagtcaaaatgtaattactactaataatagagttaataaagtgtcagttattagggctagtgctaggttaattactctttttcagactttgtcgaaactagttgattggaagtcagtggtactgcttatactaaaagagtagtaggaccctcaccagtagatagagacacatgggaatagtcatacgacatctacaaagtgtcaatatcaagtggcgtctttaaagccaaaatggtggttggatgtaaaatgaattttttttttttgagacagagtttcgctcttgttgcccaggctggagtgcaatggcgcaatcttgcctcaccgcagcctccgcctcccaggttcaagcgattctcctgcctcagccttcccgagtagctgggattataggcatgtgccaccacgcccagcaaattttgtatttgtattagagacggggtttctccatgttggtcaggctggtctcgaactcccgacctcaggtgatgtgcccacctcggcctcccaaagtgctgggattacagggatgagccaccatgcccggcctaaaatgaaattttaattggcagagaaggcagatggtgagaattgttgatccaatagtaacatgaagtccatgaaagcctgtgactataaagaatgttgagctgtagattccatcagagataataaagggggcctcgaaatattctgagatttgtggaagggtgaaatagactcctaagaggattgtggtaagtagtgcttgaattgtttgtttttggttaccttctgttaggctgtgatgggctcaagtcactgaaactcctgatgcaagtaatatagacgtatttaggagaggtgcttctgaagggttcaggggaagaatagctgttgggggtcaatgtcctcctaattctggggttggtgctaaactggagtgatagcatgcccagaaaaaaccggcgaagaaggatacttctgagataataggagcatcctgtatcggaggcctttttggacaattgctgtgtggtggccttggaatgtactttctcggacaatatcacgtcatcattgatatatagtcagtgtgttggttagtaggcctaaagttaaaagagtggtagaattaaagtgaaatcctatggttaggccagatgttattaggagagccgagagagctcctgttagtggtcaagggctaggtacaactctatggtaggcatgtgtctggtgggtcattatgtattatgcgaacaaagacgtactaatagtgtgaagacataagcttgaataagagtgacagcgaacttgagaatagttagtagaattagaataataagaaatactgaagttgcagagacactaataattgataatattagcactgcactgtattttaattctttttctcctgtaggaaaaagaagaactgattgaagagtggcaaccagaacctcttgttcctcctgtcccaaaagaccatcctgctctcaactacaacatcgtttcagggtaaattgattttgctacctgaagtacttgtatttggcttcttgtagtaacctgcagtctatagtgctttatatgtagtagtcctttttttatctgaaacaaaacattttgaagttcccaggagtaacagctttagctcctgattttaaaaaatttattctagggatgatacaggcattttttaaaatctccaatttaagcattaatgtttgcccttttttccaagaatgcacacatgttaatatttccaatggtcgaacacttaaaatgaaaagcaacagacttctgctttttacccatctggttattttctgattttaaatttgtcgcacgttaccctcataattctagatactgtatagtatgcttaactaccatttgttgattcatcaactacagacaacacctgttgatccccacaatatgaattatggagcttccgctcacttatgcctctttcctccttgcttccagtgtctcatctattttttacttttcattctcttggctatctttgctatattgtatgtattttcattaattaagaaatacagtaagaatatagaaagttatcagatatagatatagatatcagacacctatatacctaccacccagaattaattggtgttaacattttgctatttttaattcaaacttacttttacaggtaaatacaatattacaaatgcatcttaagaaattccttcacatccatcacttactcttgcctctcatacggataactactgtcttgaagttggtgattgtgttttctttgcctatatttataattttaccatatatgcctgttgccataaaaatacttggtttattttaaaatgtgatacaagatattttcctgagtagtattgttctgattctgatctgatcaaacaggagcttctattctttacttctgtagatctcttcagtcttataaaacttttatatattctgaaatcaaacctaccaatcttttttttttgagacagagtctcgctctgtcgcccagtctggagtgtagtggcgcaatctcggctcactgcaagcttcgcctcccgggttcacgccattatcctgcctcagcctcccgaggagctgggactacaggcgcatgctgccatgcccggctaattttttgtatttttagtagagatggagtttcactgtgttagccaggatggtctcgatttcctgactttgtgatccgccggcctcggcctcccaaagtgctgggattacaggcgtgagccgccgcacctggcccaaatttaccaatcttttatagtttggtcttttgaagtcttagggaatcgtttcctaccctaaagatctaatttgattgttttccatatgatggtcagttgtctcagcattattagttgaataatccagtatttacctactgcttggaaatttcccttctttggtaagccagattcccttctaaagggtctatttctggcttttatttttattcattggatatattcgtatctccttataccagagactcattcatgtataccacagctttataataaacgttgattagaatgtttttctatctccgtgttcttcaaaattgtctagactattcttgacccttcttcactgtgagtttaggtttaggtgatcatatttaaccaaaaaaatgcatttgggttttttattagaagtgtgttgaatttatggattaatttaggaggcttggtatcttgctgatacttaatctcactacccatttacatggtatatattgcttgcatacttgggtcttttgttttctatagtaaagttgctggaagaggaggaggggaggaaagaggaggagaggaatgcacacatatgggtgtaggaggctcccttctgaagggaggctggaaggagaaagatgtggggctaggatgtgtggggcatgggtcagaggtcagaggcactgaaactgcagctgaatgagagcagcctcctttctcattaggtggaacccccaaaatgggggcaaggtcagtgggaagagccagggaagagttaggaattatggatatcaaattttactcaattcttggtgtgagagaaggtggagggacaggcaaaatgaggggcccaacagcacgtgggccgagtcagagtaagacgaggagctgggatccgtgaagtgtaggtggccaggggcagggagtctcagcaggtgtggagacagcaggggcaggctgggtgccactgcagtttgccatgtcttacttttttttttttttttttttgagacggagtcttgctttgtcaccaggctggagtgcagtggtgcgatctcggctcactgcaacctccacttcctgggttcaagccattctcctgcctcagcctctcgagtagctgagactacaggcacaagccaccatgcctgcctaatttttgtattttcagtagagacggagtttcaccatgttggccagaatgatctcaatctccttttttttaattaaaaagtaaactttaatgtcgaaaatgcagacttggggagggcagaaagatcacacacaaggctgtcacttcacacttggaaggttgcacagcagcgggcagagacgctcctcacttcccagatggtgagggggccgggcagaggcgctcctcacttcccagacggtgcaggggctgggcagaggcgctcctcccttacaaacggtgagggggccgggcagaggtgctcctcacttgccagacagggtggcggctgggcagaagtgctcctcacttcccagatgggacggcggccaggcagaggtgcttctcatttcccagatggtgaggaggccgggcagaggcactcctcacttcgcagacaggacggcggcaaggcagaggcgctcctcatttcccagacggtgaggaggccgggcagaggcactcctcacttcgcagacaggacggcggcaaggcagaggcgctccttacttcccagacagggcggcggctgggcagaggcactcctcacttcccgggctgtgaggcggccaggcagaggcactcgtcacttcccagagagggtgggggcctggcagaggcgctcctcactgcccagacggtgcggtggccaggcagaggcgctcctcacttcccagatggtggggcggctgggcagaggcgctcctcacttcccagatggtggagcagccgggcagaggcgctcctcacttcccagatggtacaggcagagatgctcctcaggtctcaatctcttgacctcctgatccacccgcctgggcctcccaaagtgctggattacaggcgtgggccaccacgcctgccctgctgtctcttctttctcctcctaagcagctctcttagtctcctgaattttgatgttctacttaacaacctcatgttcttacgcatgttgccctgctggaggcgtccttctctttgggaagcctgacccaccaacagtgcctcaggagatagacatggaagcttagccggtgggggcccctcatctctctcccacctcagttgcaggggaggggtcggttgcagctgcagcggtggccccgacagttttcttttgcgggacctgtggccggcagctctgggtggagaagacctacttgatccaagagctgcaggatccttgggctgcatgtcctcccccaccatcagcaagcctggagagctgggcaggtggtctttacccagcaccttcaaggccgccttctctggccacagggagcagcccggaactggggcagggagcactgttggaagtgggtcaggcttcccaaagggaaggatgcctccaacagggctgtgtgaactggcgactccatggcccttggagtagaaactcactgcatgcacctgggccttgtcagtctggttgttttctgtcaagctcttgaggtggacatttccctccaagggcctgggattgtaccaggaggaagtgaggtttccctgagtctccaggggcctagaggtggaagctgcttccccattgctacaggggccccttttattgtcctcctgcccctgggtctctacctggtctttcacctccgttgcttctttgggctcttctgccctcacctccatcttcgggagcctggctgggatcacctgctcatctaatgaaggaagttgaaggttaaacttgcctctgagacaagagatcctcacggggctgaggtgtccaaacatcctggagttgcgagcagacagcacgggtttcttccttgaggggggggctccagaccacaggaggcaggaccctctgtggggtgcccgtgttccgagggataagacacagcctcacaggggcgccatcccacctgactggaaaagaaggcccaagatgtcgctgacggttgaagaggagtgggaaacggccccagattcccggggcaggcacaggtgcaggagccgcggggtgagcccggccagctgggaaggcctcacggacaagacgagcaggttgccggtggcgtggccaggacctgcggtggaaccaggaacaaaatatgcttagtgagttgcccattttgagcgagttgtgcacagacgaaactaagggtcagaagcggagaggatactccgaagtcacccacttctctgtggccgggtgcacactgggcatctgggagtttatgacatcactatggggctggtgacagagccagggtgtgaaggagtgcttaggagcccagcgagggtgcctacaagaggagtcaaagggcaaagggtgagacccttccaccagtccccctggactctagcctcagggacgtcctgctcctgggggcaggtgtgtggccctggatgggcccccctgtggggctgttgggggtgcggggctgatccgccagagccatggcgcctggcccaggtgctggctggcacccagtggccctgtcttggacggccctgtcccccgggttacagggccagaacctggaagcagagcacaggaccagccagatcctgccaggctcccccggggcctttccagtgcctctgtgccgcctggagcaaggcccgccttctccatggctgccgtggcctcaagggccaccagccttgcttcgcaggtttccaaagagaggacgcggtgccctgacctgactggatgcgcctcttaccacatgcctccctggcaggcagggtctccgctttttacaaatttgcctgagaccattcctcaggtcattcaggtggtcatggcccagccaggctttgaacctgggctgtgcgattccacagctggcgttctggcctgtgtgcctcatgatcatggatacagcatctattcttattttttcctgtagttctggggtacttagcaccgtggcatatctgtaataagcacgtgcacacctcgaaggaggtcttcacttcagcatagaagttgaccatggcatgctctgggctccagtcttctacaaagatgtagggcaggaactaccagttgtcagcacagcaccatcccacattgctcttctaatggagcctttcaccccagatgttctttctcgtctgatgggaaggatccacgtatgtaaagattatgttctagatcagctttggtctgtcctaaaagaaatttgccagtggattattccatatggataaaagtcagtttctctggtcttcctggaatgtgtctagaaagcaaatacattatttacgagttcatagtagatcaatatattggattaaaatatgacaaacataatttggtcattgtgagcatgccagctcggtcaactattcaccacacatgatgccctaaatataactctaggttttcttatgcccaagagagggacatactcttgggtgtctggactagggaaacatgtatgaaaaaccatttggccactctacatcttgttattggagaatcaaaactatctatattcaaagatattattaaaaggtaagaagttaacttctgtcattttgttaattgttttctggttgttttgtagatcttttgtttctttttttattgtttgctttatggtttggtgagtttctgtactgataagctttgattcctttatttcattgacatatctggtgtaatttttttctctggttactctggagcttacatttaaaaatgtatagttatgatagactatttaaagctgataaaaattttgatcacacacgaacctgctatactacccccacatcccttgtcagtgcacaaaatttgtacttttttgccttaatttatattgttctgtattgggtgtttattaataactcattgtagatataaatatttttgactattttgatgttcagctttctcaagggtgatttgaaagattctaaagcattaatttcagtaatgtagaattctcagtttgaatatgaatttacttttaacagttaggtggatagtgtcctgtttttgcattagtattctttcacttgcgattgaagcacttgttaagcatttcttgtcaggctggtcttatggtgatgaattccataagcatttgcttgtctgggaaagactttatttctttaatttctgatgggtagctgtgctcagtacagtactctttgctgactgatttctcattagcactttgaatatatcatcctcatctttcctagccttcaaggtttctgctgtgaaaactgatagtctaatggagacttgcttatttgtgatctgatgcttctttcttgctaattttagaagtttttctttgtgtttgacttttgacaaattgattataatgtgccttagaaaaggcctttttgggttgaatatgtccctttaagcttcacggaactggatgtccgtatctctcccaagaattgggagattttcagctattgttttgttaaataagttttctgtgtctttgtctcttttctctgtttctcttctatattttcaaaatctgttatcttagtatcatggcacaagtctcatagactttctttgattctttttactctttttttctccttttttccctcagtctgggttatttcagaagtcctgtctgcaagttcagaaattcttttgtttgatctagtgtgccattgaagctgtcagtggtactttttaatttaattcattcaattcttcattcctaaggtttctgttggtttgttttcttttttcttttctctttttttttttttttttttttgagacggagtcttgctctgtcgcccaggctggagtgcagtggcacgatctcggctcactgcaagctccgcctcccaggttcacgccattctcctgcctcagcctccggagtagctgggactacaggcacccgccaccacgcccggctaattgtttgtatttttagtagagacagggtttcatcctgttagccaggatggtctagatctcctgacctcgtgatccgcccacctcggccttccaaagtgctgggattacaggtgtgagccaccacgcctggcctgtttgttttctttaatggtatctatgtctttgttgaatttctcattcaggctatggcttgtttttttttattattcgattaagttttctctctgtattcttttgtatctcattgaattttcttaagatcaatatttcaaattccttttaaggcaatttgaaaatttccatttatttagggtaactttgtgaagaattattgtgcaactttggtggtgtcaagtttcattgcattttcatgctttttatctcctatgtttatatttatgagactgttgacacggtcacctgttctaattgtatagagtggcttatgtagagaaagattttcacctggagatgtgtcttagggtgtcagttggatgggctgcatctgctttagttctaggaggacacagtagtgtaatatctgtgcttttctcttgcctgttttttttttttttcttttgctagtatccattttggtgatacctgtgagtgtcttggtgacctaggctgtaggagcatgtgcagtttgtttttctgctcaggactgggggctgggggagaaggcggcggtgtcaggaagctgcatgcctatctagtgactgtgttactgagtcacaggggttggtacaccagtttgagatgggactcccctggaaacactcgcctagctgtggattactggggctggtctgcaggtttgagatggggatcacctagaaacaccagggccagttggtgagcgcactgatggcacaataaatcagtaatcggtccacagttagagtgttgcagtcactaggatgtggaaggcaaacctctttgagagtttgtttctaggatatagacagcagtagctgctttcctggagaaggctgttgtaatgacagggtagcccctgggatggaaggaggcagtgaccactagttcatggaacagaatatactcagctatggcttggctttctagatggtgctatatgtgggctccttctctggggcagtatagccctgtgggcatcaagcagcttcctaaactaggctgctagagatggggtttcaccatgttggtcaggctggtctcaaactcctgacctctggtgatctgcccgcctcggcctcccaaagtgctgggatcacaggcgtgagcccccatacctgacctaccttttttttttttttgttaagaaacttgcttatgttgttctttattttcttcttgacttttttttccccaggtttccttacagtcatgcgtcacttaatgacgtagatacgttctgagaaatgtgttaggcaattccattgtcatgcaaacatcatagagtggacttacacagacctagatgtgtagtgtgtacctataacctggtacgcacctagactatatggtatagcctattgctcctaggtcacaaactatacagcatgttactctactgaatactctaggcagttgtagtaaaatggtatttgtgtatctaaatatatttaagtatagagaaggtacaatagggccaggcatgatggctcatgcctgcaatctcagcactttgggaggctgaggtgggcaggtcacttgagcccaggaatttgagaccagcctgggcaacatgacaaaaccccttctctaccaaagaatccaaaaaattaggtgggtgtggtaatataggcctatagtcccagctacttgggaggatgaggtgggaagatggcttgagcctgggaggtggaggttgcagtgaaacaagattgtgccactgtgctccatcctgggcaacagagccagaccctgtcttaaaaaaaaaaaaaaaaagtacagtaaaaatacagtattttactcttataggaccactgttgtatatgtggtccattttgtcaattgagatgttaaatggcacgcgactgtatatccattaattgtaggcgatttgagactggctctctgaaaacacatctacactcactgtgcccaggcctggaatagctcctgtcatgcctttgtgtggattaggggaaggtactcttcctccagcaagtgcagcagcctggtgcagaccttgggctgtggtgccgatccctgggtgcccctaacaggaccccagctcatgcagcaaccttgctctgccctttcttctggcagagttcagatataggataatgtgtccttagataatttagtggttatatttttatgacttcattagtattattcattagttgggccaatgttatgaggctatattttctttattggatacttttgttttccccagagttaatcatttttgtttggttacttgattggttctacagtggtctttatgttgtttgcctctaggagcataaaactccattcagaatgttcacacgttagttatctattagattcactttctttgttctttctcctgctccactcctgactggttgttatatgcagctgctacacagggtggccctggagtgtcccatcaccattagcttgagaatttcctttctctgttctgcattggctatttcctgtctcttggtttacagtagattatagatagatttcagagaagggtcatggaaggtgaatttttttttttgaaacctacacatcttaaaattttttatttttacccttttgcactgtactgattgttttatcagttttattgatctgttagacacttcctcaatatctggtgattgttaacatcccttcttttttttcaatatgcacaatatttttattgtcatcaagaacattatgtaaattgtttgcagaaactacaagaaaattgaaggttgttttgttgatagtgaaaggcaatggaagggcactgtggatcaataaggctgaggggcgagacaaagagggcaaaaatctttactgagctctcgggcgaggttcactggtccgcagggggagggccagggaagtcgcgctgtgccaaaggtgcagagcgcttttatggatgctgggtgaggagtgggcggggtaggggcgggataggttgagtttcgtgcttctgagtgtgacacgccctagtgggcatgcgcgttggtccgggtggcgggaacaggaaaggtgaacccggaaatgctgagtcagggtacccgatgtggctgtcaggatggcgggaataagcgaaaatgccaagtcagggtagccaagatggctgccgagatggcgggaaccggtgaatccgggaatgctgagtcagggtagccaagatggttaccgatcgccatcttggagtcttcaccggagtccaatcagattacattcagtgttacttttcttcaatttatgcaatacctatttacattcaatactgagttgacacaagagtaagcgaattaacttagatttttttcctttagacagaagccttattgatatataatctatttaccataaaatttaccattttgaagtgtaaggtttttttcctttaaacagcagctgtattgatacgtaatctatataccataaaatctgtcattttgaagtgtataattaagtggtttttagcatattcccagagttatacaactatcaccaccatctaattccaaaatatttttatcaccccaaaagaaatcccaaagccattagcagttacttcccactccttcctctgcccaggccttagcaaccatttatctactttatggacttgcctattctggacatttcacattaaaaggaataaacaatacttagcctttgtttctgggttctttcacttaacataatgttttcaggactcatccacattgtagcatgtatccgtacttcattttatcaccaaataatatttcagtgtatggatacacacattttgtttatacattaatcagttgatgcacaattgggttttttccctcgtaagagtatatgaaaaaataaaaaataataaaactgctatgaaataatgtgtacacatttttgcatgggcataatgttttaatttttcttggatatatacctaggagtaggattgctgtgtcatgtgataactctgtgtttaacattttgaggaacccccaaactgttttccaaagtggttgcatcattttatattcccactagctacatatgaggtttacaatttcttcacatccttagcaatgcttattattttctattttattgtagccatcctagtaggtgggaagtgggatcttatggttttaatttgcatttcccagataactaatgatgttgagcaccttttcatcggcttattggccatttgtatattttctttggagaaatgtctactttaatcacttagctgttttcaattgggggttctttctatcattaaaactgtaaaagttctttatatattttgaatcctagtcccttgtcagatatatgatttgcagattttttttttcattctgtgggattttattttacttctttgatagtgatctttgaaattcaaaagtttattttaatgatgtctgacttccctgtttttccttttgttgcttgtacttttttgtcatctgtaaaaactttggcttaatctaaggttatgaagatttactctttcctgtcttctaacagtttatagtttttgcccttacatttagtgtgtaattcaagttaatttttgtatatggtgtgaggtagaggcctatctttatctttttccaggtggatgtcaagttgtcctagcaccgtttgttgaaaagactatttcccttctgagttgtcttgttgaaaatcagttgaccataaatgtaaggatggtctattttcaagaatgacacatgaaaatggtcattgagagccctgttaaaatgggcttggctttttcttcagttttactgaggtataattgctaaataaaaattgtatatattcaagatgtataataagatgattttatatttatatatatatacacacacacacattgtgaaataatgaccacaatcaaattaacatatccatcaccacatttagttaccatttgtgttttagaggggtgaggatggggtgggctttttgactgaggggcttgcactaggataatcagacagggacctgttcgtttatttgaggggacccccaaacttagtatttatagtttttattctcttggctttgtgtttcccaggagaggagtcctctagtctattactttgcaggtaaaaagctgctttccaccatttgggagctgagttgaaggcaagaggcccagggtcttaccattcattatgtaactcacacctaatttttgtcttcagaacggcacccctgccttcactcattcttaggacttccagtttatacacagcctctccagagagcacttcttcagggtggaggaggggagtgactgcctgttgtctaggcacccagccagtcctcctgttgtcggcctttcccgttttccagtgtttaatggaagctggtgccccagtttgggagcatgtttcaggcgttgctgcttggcttttcactgctggcctaggcttgcctttctctttgatctctttgacttatcaaatacaacttatccatttgctttccagtttcccacattttgtcacctttctccttgttctggtctgggtgggtttagacctttaaactttgtaggcattttgcatttgctttctgagtgtgctttcagaagagatcaagggttgaggtgttttttaatgttagctgatattaagtggtatgaagaaatatcaaagcagggtcagtaaagagaggtagagttgctgcatatatttcttgttcatttcttttgactgctacatattcttctgtgtatacagccaccaaattttacttctccattttcctcatgatagacacctaaaccgcccccatttcccactgctgcaaagaatcctctgattaatattccctcatgaacctaatattcccttgaatttctctgggggtatagaaccaggaataggatactgatatatgcctgcctaattttcctgtaggacttttctgtgtcatctatggtcccctgagatagtatataggaattcaagttttccctacatctctgtttagcaatactgtttgctttggatttctcttaatgtttgagcctttgagcatcacttcatctactttttagctactggagtcttctgcttctttgaatgcctcttcatatcttttacctgtttttttactggattcccagtctttcttttgattagcgaaggttctgtataccttgtagattttaatccttagtcaatttttgagttagtactctgttacattgattctaagacacatactgtttttccctagtttaaaatctttgaagtggggatgaatcttaaagctgctgagagtcactgatgagtcattgtcagccaggaaggtagtttgtgacatggttgtcattgcttatgtaccagtgaacttcgtggtggcgggcttactgtcagcactccagttgaagtgtatgccctgctggtcaatgaggcaactgatagccggagaaatggccagacctgcagagcagaggcagaggatgacaaaaggctttgaagatctctttgtcagacttcctgttgcctttgggtagtatcagcttactttctagaaacatgtgatttaattggaaggacgataaaactatgaggttagttcaataggaaagttgcagcatcagaacttgagaatgggtgacagttaacatgtcagataatctcagaaatcatagtggagcatgctggtaagaaatgccaagacactgccaagagcaaggagaacatggtatgaaaacttgtggtatcagtgacttagaggagagggacagaactcagttaaagaggttttaggaatgtcttgacttacattttccttttcataagtacaaatgtagtgtaacaaaaatctgggtctaagaatgtataatagacctttgcattaagcataaactaaaaagctgcacatgacaagaaaacatcattgtattttaattgacactgtttctcttccttagtgatggataaaatacaattgatgacatcttagattcagtgaaatacaataaacctcttctctatcacccgtctgttaactttgtctttggtatctttcgttgaaccaaatttcttaattttgacttggtcagatgcatccatcttggccttacggtttgtattcttaaagacttggttaagaaatcatttcctaccctgaggtcccaaagacattcttccacattttgttatcttttctaaaataccttttagatttttaatatggctggaattcactttatacctggctgttcaactttatccgtagagaaaaatttgtgtgaaacctagtggtttgtggggtaactgctgtcattttccaggtatttgtatgtacacagttctcatgaattctagattctttcattggtctctgcctacctgcaaatattacagtatttgcttccttctggtaaagcacctcccggtttctaaattcagttagccattcctgaacttgtatccttctgtgtaattattgaagtttatagagctccattagaaatcctggtggaattttagttgtgattgcattgagtttgtagtttatcttggcaaaatgtaatatctttaaaatgttgagccatcccttcagctgaccatcgtatatcttatcatttattactgtctttatatttttcttgatactgtaaatactttgtattttgttacctttatttactattaattccaatggtttgttgatttcgttgagttttttatgtaaggtgatcatatcacctgctgataacagtgtgactcttctcagacgtgtgtgtgtgtgtgcacacttgtttattcacatttttggacttacagttttactggtatggcctttagtaatatgctgaatagtaaaaagataccaagcatccttgttttgttcatattcataaaagtaatggctctcttgtttcccagttaatatctgtaggttttaggtattatagtcttatcaattcgagaccatttcctccgatctagttttctaagagttttataaatagatgttgaacttcatcaaatgttatttctgcatctaagatcattgcatgacttttctttattatgttgtattttctgaaatttttacttcttatttaacttctattaatatatctcttaggtgtactctgttctttttctaacttagttgaacacttaatttacatttttaatcttttctagtattgattgacattctctttacaaaacaccctgagtgtaattcaggattcaggcttaaaaaaaggttttgaaagataataaagtacgtattccttattacagaaccactctcatgcagtctagggcagcatccccagaatagtttcattccattgagtaaataaaagcagtaaagagtttcatatatgtttaggacaggttttgctactgaatgaacttgctgcaaactttcaaaattgagtgtgaggcataatgaacttttctgtgtttaagcctataaattcccttctaagtactattccagctgtaggctatactttttttggggggagggaggatggagtcttgccctgttgtcaggctggagtgcagtggcgcaatctcggctcactgcaacctttgcctcccaggttcaagccattctcctgcctcagcctccccagtagctggaactacaggtgtgtgccaccacgcccagctaatttattattattattttttaatagagacagggtttcaccatgttggccaggatggtctcaatctcttgacctcgggtgatccacccgccttaacctcccaaagtgctggtattacaggcatgagtcactgcacccggcctgtaggctatacttctaatgtgtgttattcagacctaaatattttttaattttcttttttttctttgactaaagcataatgttttccttgagtttttgtcttctcagtaatttataatttattgctatgtgattaaaaaacatgttctggatgatagcttttctgaatgatttggctgctcttgttgacacttgctttatgtcttactttattgtaaattttgcaaatgttccacggctttatcacaaaaatttatattatatattccttttattcaaggtgtcttgtgtccattacatcaagcactttaattattattcaaatagttgacagtcttagccgttttctgtctggtatgtaaatgaatgagaaagaaagagacagtataaagatcagtattacccaccgtatggattcattctctgtctctgtttcgtttttaaattgtttagtttgaaggtgtgaaatgtatgtgggctcagcatttttacatcgttttgaatgtcccttatctctaacaaaaattatgttttaccttaaagtccatttgtctgatagcagtgtagctacaccagctatcatttagttattctgtgattaataggactctgttttcaattttactgtatcattgtgtgtagttcttttgtacataattggattttaatcctagtatcattttttaactgaggagtttaatctgtttacatttattttgattactaacttatttgtatagtaaacactaatatctgctgaaatatgaggtgattcacaattttcccagtagcatttaaaagagtttcttggccaatttgatatgtaaatttaaagggatgtataagaaatggccaaaaataatgttatttgatttattaatgtaattgcacatatatatttaaaatgtcattgtgcaaataatatattcaaaaatactgctctttcctttaccccatgcagcagttttattctaattcttcctaggcatcttggataccatattcatcattagaagcattgaaaaatttatgtttaaagtctgtcattttcacgtctgtctgaatacttggatgcataactttttgaatctgtgtatgttgctatccctcaaaattttacccaagtctcattcagtatttgtggttctacacttgaccccttacagggttgctttttgttgtggtctttaaaaggtttgcttacttggttgtatactgtttcattgtgaagtcccgctcccaggaatatgtattatgtgtgggaaataagtacaatatctgtgtcaaattattttacctccctttataaaaaacaaactgatttcttcaaaacacctaaaggtagcattgttagagatcattctggttgaagttgtaactaattagtagtgggtacagctgcatataataggaaacccaaacttagatggcttagggaaagtagaagtttatttgccctcacaagtggggagcaaggtagctagcgccacagatgattagggacccaggttaccatcctgtgttctgtccttgaggtgtgtgacttccattcataagtcaccttaagggaggatgtcaggcagatgggcagaaaagagtctccttctgggcctgtcagcttggttacggcaatgctggccacacctagttgcaggagcagctgacagaagtggtcttttgttccagggcagtggccttaattttttcatttcttttttttttcccttgcctttagtctgcttgatcaggttttcttgattagacttcccttattcttttcttctcctcatgcttaacataagtaattcctgtccaatttttttttgtttgttttttgagacagggtctcactctgttgcccaggctggaatgcagtggcaccgtctcagctcactgcagtgtctctctcccaggtgcaagggattctcctgcctccgcctctggagtagctgggattacaggcatgcaccaccacacccggctaatattttttgtatttttagtagagacagggtttcaccatgttggccaggctggtctcggactcctgacctcaagtgatccccctgctttggtgtcccaaagtgctgggattgcgggcatgagccaccttgccccaaatgttaattaatcttcctctcttccttactgagcagtacagggacttactagactcctacttcagttgttccccatccccactccccctttcttgatgtctgatatttgacctccacttattttgtatcctccaggattattatatttgagaatcaccttctttacctatttaccactttcttattgccagtctttaggtatttctttctttatccgtgcagcttctttgcgcttaaaatttctttttctaaaatatattctctattagattgttatgtagagattcagagaaggtaatctgtatctcttaatgagaaatgtttttattttacctccttggatgacagttagtgggtaacaggttctaagtggatcattatttgccctgcagccttggagaatttcttcatcatggcctggcctgtgttatggggagactgtgtcagtctaattattgttcatcttctgttttttctagtggctttcacaattatttttctctaaaattctacagtttcactgtcatgtgtcttcttgtaatttattcatatttatcctacttgggattcatttttgtacttcagtctgtggatttctgtctcccatgaattctgggaattttttagcttttatctgttcaaacattgtctctcacttttttcctccagtttttccctgtagagctaatgtttagtgtacttttaaccttcatatcctctacgttcagtatgtactctttcatatttttgcatctcttggtaatctcagctctgtctttcatttttctgcagtgtctgatggggtatttaatctatcttttagatttctaattttattggctcttagattttatttctggaagttatatttgactatttagcaagttagcctgtccttttttgtttttgtttttgagatagaattttgttcttcctgagcaggctggagtgcagtggcacaatctcgactcactgcaacctctgcctcctgggttcaagcgattctcctgctttagcctccccagtagctggtattataggcatgcgccaccatgcctagcttatttttttgtattattactagagatggggtctcaccatgttggtcaggctggtcttgaactcctgacctcaggtaatctgctcgcctcggcctcccaaagtgctgggattacaggtgtgagccaccacgcccagcccagcctgtccttttcttagtaactttttaacctttccttatgtttatgctcttgggagcactttctagtgtccagcgtctcgcgttcttgggcagtggcccttctgcatgtcttgtatcctgactctcactcatggtggggttgtggtttttgattgggaaagttgttttctctcttttgagtcctctcaggtctcgattgtggagatgtctttctggttggttttacttgcttctgcagcataccctataagattttaggttccaggattcctgtatcaagtgcccattatgacctattcctgctagcctgcatggggcacaggtctgagacttccatttctcaccggaaactttgttccttcgctactccaagtgctggacagaaatagtatccctacatcacatcatgctgccttctgatagcttttgagctgtggttaagtgttttggatatacttgttcttaatcatttgttttctgtgtattacagtttttatagaatggtctcaacgtttatggcacctttggtacatgggtggtctatctcggtatttgtttgttgtttgttttttgtttttaatctttttgtgactgccaatacctgactatgaaatcagggaggacttaggaaacttaaggaaaccttgagaagtaagaacctgaataacatgataaaatcagaatcacagttgaggaggtgagtggcactggatttgaaagagaagcccggagggcagccaagatagccgaataggaacagctccggtctacagctcccagcgtgagcgacgcagaagacgggtgatttctgcatttccatctgaggtactgggttcatctcactagggagtgccagacagtgggcgcaggacagtgggtgcagcgcaccatgtgcgagctgaagcagggtgaggcattgccttacttgggaagcgcaaggggtcagggagttccctttcctagtcaaagaaaggggtgacagacggcacctgaaaaattgggtcactcccaccctaatactgcgcttttccgacacgcttaaaaaacggcccaccaggagattatatccctcacctggctcggagggtcctacgcccacacagtctcgctgattgctagcacagcaatctgagatcaaactgcaaggcggcagcgaggccgggagaggggcgcccgccattgcccaggcttgcttaggtaaacaaagcagccgggaagctcgaactgggtggagcccaccacagctcaaggaggtctgcctgcctctgtaggctccacctctgggggcagggcacagacaaacaaaaagacagcagtaacctctgcagacttaaatgtccctgtctaacagctttgaagagagcagtggttctcccagcacgcagctggagatctgagaacgggcagactgcctcctcaagtgggtccctgacccctgacccctgagcagcctaactgggaggcaccccccagtaggggcagactgacacctcacacggctgggtactcctctgagacaaaacttccagaggaacgatcagacagcagcattcccggttcacgaaaatccgctgttctgcagccactgctgctgatagccaggcaaatagggtctggagtggacctctagcaaactccaacagacctgcagctgagggtcctgtctgttagaaggaaaactaacaaacagaaaggacatgcacaccaaaaacccatctgtacatcaccatcatcaaagaccaaaagtagataaaaccacaaagatggggaaaaaacagagcagaaaaactggaaactctaaaaagcagagagcctctcctcctccaaaggaacgcagttcctcacaagcaatggaacaaagctggatggagaatgactttgacgagttgagagaagaaggcttcagacgatcaaactactctgagctacaggaggaaattcaaaccaaaggcaaagaagttaaaaactttgaaaaaaatttagacgaatgtataactagaataaccaatacagagaagtgcttaaaggagctgatggagctgaaagccaaggctcgagaactatgtgaagaatgcagaagcctcaggagctgatgcgatcaactggaagaaagggtatcagcgatggaagatgaaatgaatgaaatgaagtgagaagggaagtttagagaaaaaagaataaaaagaaacaaacaaagcctccaagaaatatgggactatgtgaaaagaccaaatctacgtctgattggtgcacctgaaagtgacggggagaatggaaccaagttggaaaacactctgcaggatattatccaggagaacttccccaatctagcaaggcaggccaacattcagattcaggaaatacagagaacaccacaaagatactccttgagaagagcaactccaagacacataattgtcagattcaccaaagttgaaatgaaggaaaaaatgttaagggcagccagagagaaaggttgggttacccacaaagggaagcccatcagactaacagctgatctctcagcagaaactctacaagccagaagagagtggggaccaatattcaacattcttaaagaaaagaattttcaacccagaatttcatatccagccaaactaagcttcgtaagtgaaggagaaataaaatactttacagacaagcaaatgctgagagattttgtcaccaccaggcctgccctaaaagagctcctgaaggaagcattaaacatggaaaggaacaaccggtaccagtcactgcaaaatcatgccaaaatgtaaagaccatccagactaggaagaaactgcatcaactaacgagcaaaataaccagctaacatcataatgacaggatcaaattcacacataacaatattaactttaaatgtaaatggactaaatgctccaattaaaagacacagactggcaaattggataaagagtcaagacccatcagtgtgctgcattcaggaaacccatctcacgtgcagagacacacataggctcaaaataaaaggatggaggaagatctaccaagcaaatggaaaacaaaaaaaggcaggggttgcaatcctagtctctgataaaacagactttaaaccaacaaagaccaaaagagacaaagaaggccattacataatggtaaagggatcaattcaacaagaagagctaactatcctaaatatatatgcacccaatacaggagcacccagaatcataaagcaagtcctgagtgacctacaaagagacttagactcccacacattaataatgggagactttaacaccccactgtcaacattagacagatcaacgagacagaaagtcaacaaggatacccaggaattgaactgagctctgcaccaaggggacctaacagacatctacagaactctccaccccaaatcaacagaatatacatttttttcagcaccacaccacacctattccaaaattgaccacatagttggaagtaaagctctcctcagcaaatgtaaaagaacagaaattataacaaactgtctctcagaccacagtgcaatcaaactagaactcaggattaagaaactcactcaaaaccgctcaactacatggaaactgaacaacctgctcctgaatgactactgggtacataacgaaatgaaggcagaaataaagatgttctttgaaaccaacgagaacaaagacactacataccaggatctctgggacacattcaaagcagtgtgtagagggaaatttatagcactaaatgcccacaagagaaagcaggaaagatccaaaattgacaccctaacatcacaattaaaagaactagaaaagcaagagcaaacacattcaaaagctagcagaaggcaagaaataactaagatcagagcagaactgaaggaaatagagacacaaaaaacccttcaaaaaattaatgaatccaggagctggttttttgaaaggatcaacaaaattgatagaccgctagcaagactaataaagaaaaaaagagagaagaatcaaatagatgcaataaaaaatgataaaggggatatcaccactgatcccacagaaatacaaactaccatcagagaatactacaaacacctctacgcaaataaactagaaaatctagaagaaatggataaattcctcgacacatacacccttccaagactaaaccaggaagaagttgaatctctgaatagaccaataacaagctctgaaattgtggcaataatcaatagcttaccaaccaaaaagagtccaggaccagatggattcacagccgaattctaccagaggtacaaggaagaactggtaccattccttctgaaactattccaatcaatagaaaaagagagaatcctccctaactcattttatgaggccagcatcatcctgataccaaagctgggcagagacacaaccaaaaaagagaattttagaccaatatccttgatgaacattgatgcaaaaatcctcaataaaatactggcaaaccgaatccagcagcacatcaaaaagcttgtccaccatgatcaagtgggcttcatccctgggatgcaaggctggttcaatatatgcaaatcaataaatgtaatccagcatataaacagaaccaaagacaaaaactacatgattatctcaatagatgcagaaaaggcctttgacaaaattcaacaaccttcatgctgaaaactctcaataaattaggtattgatgggacgtatctcaaaataataagagctatctatgacagacccacagccaatatcatgctgaatgggcaaaaactggaagcattccctttgaaaactggcacaagacagggatgccctctctcaccactcctattcaacatagtgttggaagttctggccagggcaattaggcaggagaaggaaataaagggtattcaattaggaaaagaggaagtcaaattgtccctgtttgcagatgacatgattgtatatctagaaaaccccattgtctcagcccaaaatctccttaagctgataagcaacttcagcaaagtctcaggatacaaaatcaatgtacaaaaatcacaagcattcttatacaccaataacagacaaacagagagccaaatcatgagtgaactcccattcacaattccttcaaagagaatgaaatacctaggaatccaacttacaagggacatgaaggaccccttcaaggagaactacaaaccactgctcaaggaaataaaagaggatacaaacaaatggaagaacattccatgctcatgggtaggaagaatcaatattgtgaaaatggccatacttccccaggtaatttatagattcaatgccatccccatcaagctaccaatgactttcttcacagaattggaaaaaactactttaaagttcatatggaaccaaaaaagagcccacatcgccaagtcaatcctaagccaaaagaacaaagctggaggcatcatgctacctgacttcaaactatactacaaggctacagtaaccaaaacagcatggtactggtactaaaacagagatatagatcaatggaacagaacagagccctcagaaataacgccacatatctacaactatctgatctttgacaaacctgagaaaatcaagcattggggaaaggattccctatttaataaatggtgctgggaaaactggctagccatatgtagaaagctgaaactggatcccttccttacaccttatacaaaaattaattcaagatggattaaagacttaaacgttagacctaaaaccataaaaaccctagaagaaaacctaggcattactattcaggacataggcatgggcaaggacttcatgtctaaaacaccaaaagtaatggcaacaaaagccaaaattgacaaatgggatctaattaaactaaagagcttctgcacagcaaaagaaactaccatcagagtgaagaggcaacctacaaaatgggagaaaattttcacaacctactcatctgacaaagggctaatatccagaatctacaatgaactcaaacaaatttacaagaaaaaaacaaacaatcccatcaaaaagtgggcaaaggacatgaacagacacttctcaaaagaagacatgtatgcagccaaaaaacacatgaaaaaatgctcaccatcactggccatgagagaaatgcaaatcaaaaccataatgagataccatctcacaccagttagaatggcagtcattcaaaagtcaggaaacaacaggtgctggagaggatgtggagaaataggaacacttttacactgttggtgggactgtaaactagttcaaccattgtggaagtcagtgtggcgattcctcagggatctagaactagaaataccatttgacccagccatcccattactgggtatatacccaaatgagtataaatcatgctgctataaagacacatgcacacgtatgtttattggggcactattcacaatagcaaagacttggaaccaacccaaatgtccgacaatgatagactggattaagaaaatgtggcacatatacaccatggaatactatgcagccataaaaaatgatgagttcatgtcctttgtagggacatggatgaaattggaaatcatcattctcagtaaactatcgcaaggacaaaaaaccaaacaccgcatgttctcactcataggtgggaattgaacactgagaacacatggacacaggaaggggaacatcacactctggggactgttgtggggtggggggagggggagggatagcattaggagatatacctaatgctaaatgacaagttaatgggtgcagcacaccagcatgtcacatgtatagatatgtaactaacctgcacattgtgcacatgtaccctaaaacttagagtataataataataaaataaaataaaatagagaagcccttgaagccttagggaagaagaaagaaaatatttggagagcacctcttatgagccaggcactttcataatagcaatttccctgagaggtagactctcccctactttaatgatgaagaaactgagaatcacagaggtcagtgatgtccctaagcttctgaatcgtcaatagccataatacagaggggatctctctgacagactctataacccatggttttttcactgagtcttcttgccttttttataagttagttcgctttcatgaatttacttcaagttgtcattcttttcttttcctggtttcccagcatctgtgttttctcaaggatgaccaatgctgttaaaaggtatcaatgagaatagtgtttctccattttttctggctacagtgcattttatagagcaacccagtacatggaccagtacagatacatagtcccatcactcaccctgtgccatggttctgatattttcttttccgttctattttgttttactgtttcctctggttaaaataggctgattgtgaccaactaacttggtctcacagccctttaacagtttgcaacccataatttgagcccatgattttgaaacatggctcatggctcgaatatagatcagcagagggcttaacggaagtaccttcaggagcccattctcctgtcccagccgggctcatatccggctccagtgtagctgccacccacattctccccgctccccaggagtgtgaggattcctcttcaacagcattccagcgttaactttagacattgggaacatatcccacttactctttagtggcttcctatacatgacatttctttttaagccgtttaactatgcaagatcataactcactctgcctattcttgcctttgatcttattttatattttcttcctgtttggcttattccagatttttctgagatactttatttagcagcttcattcttaagcgagttttaaaaccaaagcatttaagatttgccattcattcatcttggaattctagcttatttttcttttttattttcatagtacaggtattttattaaaaataaaattaatggaaaaatatcttatttttaatgtaccatgctctaatattacttcttaaaaacaagaaatcaaagaccagtatgcaaatagggtaggatgacaacactatgttgttgtgcctaccaccaaggtaatatgatagcatgtaacatgaatgtgtaattgacatgtaccactctatctcttccctagccctccaagccacaaaactgtggtgaatggaaaagaatgtataaacttcgcctcatttaattttcttggattgttggataaccctagggttaaggtgagtagcacatattgctgaagtggacagataacattactgatttaagaaactagacataaaagacaaaggcaggctgggcgtggtggatcacttcaggtcaggagtttaagaccagcctggccaacatggtgaaaccccatctctaccaaaaaatacaaaaattagcagggcatggtggcacatgcctgtagtcccagctacttgggaggctgaggtgggagaatttcttgggcccaggaggtggaggttgcagtgagccaagatggtgccactgcactccagcctgggcaacagggcgagactctatctccaaaaaaaagaaaaaaaatcatagtattggaaagcgctatgcaagtttttcccattactttttgtctgacagagttgtgagcgggacctagacagagagaggcaagagtctcttatgtggctcagtgttaggcagcaaccacagaactgaacaggccagacctagagaatagttggagaagggtctaggaaattgctctctctcctattgggattgtgggctaacaggcattttccaggaaagacttggcccacaaatgcagaaaagttaaccaggttttgagaatcaggctagtataacttttccatattttaagtcatatactcagtctttacacctgtctcttctttatattctgttagagttggaggaggaaggaaggagctctgtgggttaaagaataggaaatgtttgttttgaactcttaaagataaattattaaagtataattcttgtacttcaataaaggcagcagctttagcatctctaaagaagtatggcgtggggacttgtggacccagaggattttatggcacatttggtaagtttttgttgtgttctctttgagactactgctttcaatagttaagattcaattttaggctgggcatggtggctcacacctgtactcccagcactttggggaggctgaggtgggaggattccttgagcccaggaatttgataccagcatgggcaatatagggagaccctgtctctacaaaaaataataaaattagccgggcatggtgggctcatcctcgtgtgcatgtgtggggattgcagcgtgaggaacgagtgcagagcagcagtactctttatgcaggggagatggcctcatacttctgcccacagtccactgatgagagcggaacccctgccatgactagccacgcagggggctgagaaacagctctaggaagaaagtggagagcagattgcctggggtggagggaggggggataaacagtgtagttttttatctttctagaatgaagatgaaggatcattgatttccttgtgtatggataatccgggaacaggccaactaaatatttgatgaatgtatgatttcaaatacagtgaattccctgggagtcatcaaagaagaccggcattttatggttgtttttattaagtgtatattctttgctcctgaaaatgttattaaataattgtttaggccgggcatggtggctcatgcctgtaatcccagcactttcaaaggctgaggcaggcagatcacctgaggtcaggagttcaaaaccagcctggccaacatgctgaaacctcgtctctactaaaaatacaaaaattagctgggcgtggtggtggatacctgtaatcccagctacgtgggaggctgaggtgggagaattgcttcaacctgggaggcagaggttgcagtgagccgagatcatgccactgcactccagcctgggcaacagagcaagactgtctcaaaaataaataaataaataaaattgtttaaatgaatttattgctggaaatagcattttggcttataaaatgacacagtgtggggaaagtagagcaagggaaatatcttccatcttccatccttgtttccatttctggatctttttgtgtttttttactttaacagttaagttttttacttttgtgattttttaatgtaagggagcaccttatgttatccctaagctagtttggtgattacattatttgtcttggaaacagataaggagaagtagtgtccaggaatcctacagctggaagtgatctttaaaatctttagttctaaccctaaaattagaaattggccaggtttagtggctcatgcctgtaatcctaacactttgggaggccaagaagggaagattgcttgagcctaggcatatgagactagcctgggcaatgtagtgagaccccgtgtttacaagaaataaaaataaacctggcactagcgtgaacctgtagtcccagctacacaggtggcggaggcaggaggatcccttgatcctaggaggttgaggctgtaatgagccgtgttcacaccactgcaattcagcctggatgacagagtgagaccatctcaaaaatagtaataataataatataaaccaagtatcctgacttccattcttgatggcaagtttgaagaaataagctcatatcagagcctcccactttcctctagtctaatgcaaatgggttgtttgcttggtttttgattggtagggaattattttcttggcaggtattagaaaactagaaaaggcacattttatggggttgttgattgtaatctgatgaaagctttctgtgactgcttgctgaggtaaaggaattgtttttgtaggtaggtacggaggagagcagcagcttgttggtattagatatcagggagtttttgctgtatttttctaggaagtaaagaagttgtttgggagggtaaaggtggggatcattgaaagaggttcagaggtgtagggagatgggggaggttgctgagtcagctggcagggcagggacagctgtgtagtaggaggaagagaaggaaatacatagccaacaatctctggctaaggaaggattggagatggtgaggagggagtgggtgaggttgatggtttgctggagataattagatggaggggtagagggtggcaagggaatgggagtgagacaaagagtaagtataaaagaaaagaacttcatcagggtggaagaattggagagtaccttgccacagaaggtcatctgtccattctgagagagttaagggtggcagcttgagggtgacaccacgagatatcagctacaatggtctggagtaaaagcgtgaactggtagtatagacaaaagcagggcatttagaagtacgtgagaatggttagtagggacataagtagacagagtttaaatactggggtgactgtgtaaaggcctactgtaaataaaaggtatacagggttattgttctttttcaggaatgtgggtaagtttaagggaagtgggggagagtacttgcgacttcaggaggaggcagaggagctaggctggtcgtctgatgggcacagttttatcctggagcgatgaacccagtggggaggattctgcagacgactgtggttggggtactatagacgaccaggtaaggtcctgtccaccgaggttctagagtttgaggggtcaggttcttaacaagaactgaccgtccggctagggtgtctttatatggctgggtatctggagtaggtaaaaggaaattggcagcttagtggatttcctgtctagcctgttgaaggactggaagataatcaccaagaggggtggtgtctgaaataaggttgggacccagcagaaaggtgcggccgtgtaagagttcaaatggactgtacccggtgggttcccagggtgtggctcgaattcggaggagtgcaaggggtaggagagtggtccagtcttttttaagctggagggtaagtttagtaaggtgtgtttttaaaaggtccttggctttttctacttttccagagaactgagggtgatatggggcatgaagattccattgaataccgagggcttgggaaactgcttgagtgatttggctgatgaagaccagcccattatcagactgtatggaagtagggagaccaaaccggggaattatgtctgttagaagaaggaaataactgcagtggccttttcagccttcagaccccgtgggaaaagcctcaacccatctgatgaaggtgtcgacccaaaccaggaggtatttgagtttccagacacggggcataagagtagagtcaatttgccaatcttgagcagggataaattgtcgtgcttgatgcataaggaaaggaggaggtttaagaaagccttgatggggtagtagagtggcattatagcccattgagaggtgattgttttgaggatggatttccaggctggaaaagaaatgagaggttctaaaaggtgggttaaagatttatatcctacatggaagtggtcatcaaaggaggagaggatagagtaagcttgagaggcagggagaaggagctttccatgatctaaaaaccagttgccttgagtgggaagtgactggtagtttaaggtttcagaaggagagtaataggagtgatagatgagaaggagaaatattggccactgggagcagatactggggagtttgctgtttctttggctgttttattggcataggtgtttccttgggcaatgggatcagaggttttttggtgtcctttgcagtggattactctggctttggctggaaggagggcagctttaaggagggctttattaagggggcattgataatagaggatccttgtgtagtgagaaaacctctttctgcccagttgacagggtggcggtggaggatgtgaagggcgtatttagagtcaattagatattaacatgcagtcctttgccaagagttagggcatgagttagtgctattaattcagcttgttgagaggttgtaaatggggagagtgcagcagtttcagtgatagatgagtgagacacaatggcctatccagcttttcctggtgttaatcaactggtttttgaagaactgccatcaataaaccaagtgtggtctgggtcagggacaggaaaaagggaaatatggggaaaaggagaggaggctatgtggattaaggaaatacagttgtgtggattaggatttgtagtgggtagtaagtgagaggccgggttgaagtcctgtccaaaggcaatggtccccatgagattttcaataaagagtgaatagagctggaggaggtggggagccgagagtatgttttatatgtgaagaggaaactaagtcttggaggttgtgagtgctataaaaggtgagtggggcatagcctgtgattttgagagactctaagagtataagggctgtggctgctgtggcatgcaggcatgacggccagcccaggactgtaagattaagctgtttgaatacaaaggctactggtcacaggcctggttcctgagtaagaattcctacagcgcagccctgcgtttttgctgtgtggagaggaaggagggttgggaggagtcgggaagcgcttgagtaggggttgcctctagggccttttttagagtaaaaggaggggcgagggaaggatttaggatctgtgggttcagctaagtttccttttgtgagtttatagagtggtttggttaggatggcaaaacctggtatccaaaggcagaagtatccaacaacgtctaagaaggagaggagtagttgtttggtggtggggattggaatttggagattagctgaatacggtctgctggaagtgcacacctatgttggtggaggattataccaagataagtagaaatttgagctttggagggggatactctgtaccccttggagtagaggtgttgaagaagcaggatagtgtcttgctgggaggattggtaagaggggctgcaaagaagaaggtcatccacatattgaatgagatgggaaacaaatggacgaaaagaaagcaggtcacgggagagggcctggctaaagtagtgtgggctgtctctgaaaccttagggcaggacggtccaggtgagttgttgggactggtgggtgtcagggtcagtccaagtaaaggcaaaaaggggctgggaagagggatgtaaggggatggtaaagaaggcatctttgaggtcaataacagaataatgagttgtggaaggcggtattgaggataggagagtataagggttaggcatgacaggatgaatggggaggacaatctgattgatgaaacgaaggtcttggactagcctgtaggatttatctggtttttgaataggtaggatgggagagttgtaaggggagttggtagggactaagaggccatgctgtagtagacaggtaataacaggctttaggccccttaaagtctgttgtgggatggggtattggcattgagcaggataagggtggccatgtttcaatgggatgataaggggtgaatgatcagttgcaggcgaaggagtggaggtatcccatactttagggttaaggtggggagatgaaaggagaggttgcgagggaggtttggaattggataaaagggtagctctgagatgtggctgtagtccaggaatagtcagggaggaggataatttagttaaaatatcttggtctaataaggggactgggcaggtggggataactaggaaggagcgcataaaggagtgttgcctgatttggtaccagagttggggagttttaaggggtttagaagcttggccgtcaatatgcacaacagttgtgggggcaagggaaacaggcccttgaaaagaaggtaacgtggagtgggtagcccccgtatcgattaagaaggggacggacttaccctccactgtaagagttacccgaagcttggcgtctgtgatggtccagggggcctccgagatattcgggcaacgtcagtcttcagccgccaagccgaggagatctgggaaggagtcggtcatttcgggtttgtactccaggagctccaggattggtgatgagagtcagacagtctgacttccagtgagggcccacacaggggcatggcttagaaggaatcccgggccgtgggcattccttggcccagtggccaggtttttgacatttgaagcaaggtcccagaggggcagttaaacgctgcggtttgtacgccttgaagtttttgcaggtaggcggtgctgctggggtttgttttaaggtggaggcaagcatttgtcattctgaaaggcgcgctgccgcctggcagcctcttccctattattgaacaccttgaaggcagggttgattaattcctgttatagggtttgagggccagactctaatttttgaagtttctttctaatattaggagctgactgggtaataaaatgcatgttaagaataaggcggccttctgtcccttcagggtttggtgctgtatatcgcctgagggtggcagctagatgggccataaactgagctgggttttcacctttgttctcagtggtctcctttagtttgtcataattcacggctttatatgcagctttctgaagcccttgaactaaacaagagatcatgtagtcctgcctggctatgccttgggcccctgcctggtaggtcctttggggccttcacgggtactgccctagtgcctggccttggaggccaggctcaaggcgccagcagtcatcagcataagattgagctagggtccaaagtgaagatgacatttaagtcattccaagtgggattataggactgtgttaagtattggaattcttgtatatatttgagtagggtctgacggaaaagagcctgaatgctgactgatttgggaaaggtcagatatagagaaagggatgtgaacctggacttttccttcggctcctgccacctctcaaaggggaaattgctgggcaggggcatgggggtcggcttcagggtcaaattgtaagccagagcaggtgtgaggagggatggtaatgggagggacgtaaaggggtggcttgtgggtagaactcggttctgagggggaattagggccaggttcggataggtgggttggggggagaaagattgaaggggttaacaggtaaagaggagtcagcatccccagtggaagaaggagaggtagatggaagggagataaggaaaatttgggatggaccacattgggagcagagactagggagagatcatagtaaaaaatgcctggatgtagggtacctcagaccatttgcccattttgcaaccgaagttgtctaagtcccgcaaaatagagaaattgaaagtgctgttttctgtccgctgagagccattgtctaatttatattggggccaggccgtgttacagaaaaaaaaaattagacgtttaggctttagattgggtgaaagctaagaggtttgaggtttttgaggacagaagccagtggggaagatggagggtgggaggttgcccatgttagaactgggaaagtttgaggggaaagaaagagacaaggaaaagagcaaccactagcatcctcagtgggcatccccaatggaggtcccgggttgtgtggctggcgaatggccaaggctggcatccctggcattcaccaaacactgagggaagactgtcttcccaagaagagtccgtgaccaacgttggattttggaaacatggataagaggaaggttccttgtctcaattttgaggagagaaaaagagggagagagatgaggagagaccgaggcagcttacccgatccgtagacagaggtgggagtgttcgcgggggctggtctgaggtcctgaggtcgagggaagtctctttgatggaagagcgtggggaggataggggagaggtctcccagagagagttcccctatcccgggctttcggcaccgaatgttatgcatgcgtccaattgaagagacaacctgaacaggctaagtgtgagcaacaaggctgtttattcactcgcgtgcaagtgagctaagtatgaaaagggagtcagcagagggtggtgggattggagatggttttataggttaggggtaggcaatggaaagttacagttaggggctggattttgcaggtaggggaagaatgtcacaaggtacattatcacaaggttacagagcacagtgtcatgtgtcatgaggttgattgatcagttagggtagagcctgttacaatggtagaatgccccaaggctggctaatcagctaagacaggtactagccgtttttcttcttttgtggttttcctgttgtcccagattttctggctgcaggacaccttctggatgtgtacgtgtgggtcacaggggtcacgatggcttgaccatggcgcagcttggtcaggggaccttacaatttggtcataaaattcctagatctgccacttcctcttaccagtcatgggatcatggttttctcaggtgtaagtgggaacaatcattgcttgcatggctttagaacactttgctaaggatcacataagataccgcatgtgaaaacatgaaaaacatttggctctgtatgttccagtgagtacctaagggctatcacttatactcttaagaagaaaaattgtgcatgtctctagggatatttttgtgtgtgtgttgttgtggttgagacggagtttcactcttgttgcccaagctggagtgcgatggcgtgatcttggctcactgcaacctccgcctcctgggttcaggcgattctcctgcctcagcctcccaggtagctgggattacaggcatgcgccaccatgcccaactaatttttttttttttttttttttttagtagagatagggtttctccgttttggtcaggctggtcccaaactcctgacctcaggtgatcctcctgcctcggcctcccgaagtgctgggattacaggtgtgagccgccacacctggcctctagggatttttttttttttaaggacagtatgtatgcaaaaatatgaaggccttaagagaaaatgtagtttgtttctaaacgtcctaaagtcagctattttatggtgttctctctggaaaacaaccaggaaggccgtaatctctcctccttgtaagtgagaagctgaacaagtggctcttattggaagatagtcttaacaattcagaattcacatagctttattagaagattgcctaagtgtgaccaggtttttgcttttaaaataaaaccttttcttttattctacaagtattaatgtaattaaacaaactcttaaatagcatattgcttgttccatgccaggcagtgttctaagtgttttatcagcattaacttgtgcagtcatcctactaacccttgaggaaggtaggactatcccccctatttgacagaggaaggcaccaaggctgcccagggctgaacccccagacctaactacaatctgagctctgtgatgaccgagatagtgaggcctcctgtccctgaggttctggtgagggagccagacaggcagataagcaagtgcaagaaagtgctgagggctgtgaggtgtgcggaggcattctaggacacctccctctatggtcacttctctgccgtgtttaatactaacagtgaattgtagaatatagtactttagttttattccatgcaaatctacagctccagttagtgaaatggatcatacacacagaagatatggacatcaaaagttgaagaaaagtgagtgcccttgtagttttcctgcttgctgccttctcctcccttaggttgagagtttcttcgttgcacaaaggagcatcaagagaaacaagttcttcagttacccatatttacctgtcacaaaacctgctttgcaaggctgacatcagctaaaacccagtgtcttctgatagaaggaaaagactagtctttttgaacttttgggactatgctagaaccagtaagtcattgatttattgttgagagattcttcttcccacttatggcaactgtatataaacagttacgagtatacctaatgatgggaagatttgtaacatgctgattttcatcaactgggtaactcactctaaagtcctgaaacagggttatactcagttttacattctcatcattcattgatgaaaggagtcatttagagctaagaagtctacagaatgatttaaaatcccttttgtggttagcaaaaataatttgtatacatagcatgtttttctttttgaaatggagataccaaatgaaagcaaaccactgttgcctgagttgtccttctggctgaactgtgaaggtttgtggcagatactttcaattagaagcaccattatactttgaaggaggcctcctacctgggaacgtgagaggtggcaaagtgatggcgctcagagaacagtaatgaggatgagaaggaagacatacccaagagtaacccatgctcagctacttggctgttttcctctttcttgctagattttgcctgaaaccttttctgatagcatctctcctagagggcggctgtcagatacagggaatcacggccttggatttcatgtgatcgtagtgtcagaggtcttatactcgaagatcacctgggatacgttcttctaaactctgtgtgttgttgtaaagtcctacgtttatttaatgttggtgtaatgaaaagtgtcctttttataaaataactataaccaattggtaatggaaatcaaatgatattgactgtgttaacgtacaaataggaagaagcatgcctcatattttatcactatttgataggaatggaattaatagttcattttaacagttttgtaacgttctttaggaagtctgtaaatatactgcctcctgccaggccgtcagccctctctgctgcccctagctcaggaatgcccagaccgcctgccattgcctgtgcttgggttctcatcagtagacacatcacggctcactcatcctgggtctcaaaatccaactctgtggcctctgatttccctcctttctcccatagcgctctaagactggaggggcctggcttcttcgagcgctctccacacagggcctgtggtgaaactctgttatctagtcctccagggttgggtcctgccatagttaaaagagctaagggaattttttaaaatccctttccctccttgataatgtctcattttaaggctgttttaaagttttaagattctaagctggccagtggcctatttattctaagcatcactggtcctccgtccgagggcatgaagcctcatggttcagtctgagaggtaaaaggctgtaaggagccatgatttaagaggaaaataaaacatgtcagtctaataattataatttatcctcactattatgtcaacatcctccttacagtgcatctataaaaggactatatttccttttgtactataaatttgaattcttcattacacttacaagaaattcagacagaatcccagccccagaaagtgatgggaggtgccactactaaatgctgacacagattgttagaggagtggttactggagttctagtaagtgtcaccttcttgatgcaaagtatacagggttctttttgctaaaatgcaaacagacattaataagttaacatcaaacattggtgagacctcaatggttttggtcaaggacagttaatgcagggaaacttggtaggccttgaagtcttacagtagagtgatatcaaagcataaccagaagttggaactgccccagtaacacattttgcagatagatgcgtagctgatttagttcatgtattttagaagttgtatgggcctagaattattttaatagatcttgtataatctatcatttaaaaacaattccattttggccataaggtgaaagtattgataattatactgcttgtgttcttttatttgttctttagtagagaaaaagaattataaggcagtttaaccatttaacttttttaactgaaatagatgttcatttggatttggaagaccgcctggcaaaatttatgaagacagaagaagccattatatactcatatggatttgccaccatagccagtgctattcctgcttactctaaaagaggggacattgtttttgtgtaagtaaactttacgtagttttctaatagcagttcctttgaaataatactgactgtcttagagaaatacttcattagaagttatctgcataaaataatgctgctttttgtttttcaagaaatagtcacctcaccaaaggtttcaaaatttgtgaaaccttcacttaaaagatgcttaacggtgtctatagtcatttatctgccatggtaattatttattgatgtccagatgaggacagctatctgccttctttgtgcagctctgtggctgtgtggtatcctagtctgtggtcaccacctcacgttgtcagtcagactgcccggcaaagtctctccatgtctcatcacccattcaccccgtcacctggtctcagctgatcttgcttcctaccttattaaggatagaggagccgtgacttggacacttctttgactacccacaagtggatcttcacactcgcgtgcctgtgctgaatgcatgctaccgaggtttactgtgaagggcagggtacagccaagcaagggctggcaggccccaggcagctggttaaaccagtcagaagcatctgctgccccaagccaagccctgtcgtcctatgagtggactaaaatttggtctcaaattgactttaatttcctcttctctgttttttttttttttgtgtgtgagatggagtctcactttgtcaccacggctggagtgcaatggcgcaatcttggctcactgcaacctccgcctcccaagttcaagcaattctcctgcctcagtctcctgagtagctgggattacaggcatgcgccaccatgcctggctaattttttgtattttcagtagagacagggttttaccgtgttggccaggctggtctcaaactcctgacctcaggtgatccacctgcctcggcctcccaaagtgctaggattacaggcgtgagccaccgcacctggcctttttttatttttattttttaattttttttattttgagatggagtttcactcttgtcgcccaggctgaagtgcagtggagtgatcttggctcacagcaagctccgcctcccgggttcaagcaattctcttacctcagcctctcaagtagctaggaccacaggcacccaccaccaaacctagctaattttttgtatttttagtagagatggggtttcaccatgttggccaggctggtcttgaactcctgggattacaggcgtgagccactgtgcctggcctcctcttttcctttttaacatcacagccagagtaatctttttaaaatgtaaatcctattttgtcacattttatttaatacaatttagagcttctattgttcctaaaataaagacccaagtcctttgtatgatcttgtgagctctgcatcactttttcaggctgattttgtaccattttccctgaggtgtttaagctgtagccttgccagccctgtatgctagtgtcctctcaccttggggcccacgcacatgctctttctgactagaacactgttcctcctcccttctcctacttaaccttctcatccttcacatacgtcacctctgcagggaggccgtcccacacctcagagcaggtcaagacccctgctgcatgtggacaaaatcttacagccagagagaatttattgttcttgtttatccatgctcacacgagcactcaaactgcctgtcaaggtcaccctgcttctcaagcctccctcccacacacagacacacacactctctcacacgcaccctgctctgctcatttgcttcatacttactgtacttttcttttgtagagcttgtaacagtttataattttatatctgtgtggttatttgcttctgtttcttgctgggagcccattacttagaatagtatttatcatttagtaatggtcaataaacagtagttcagtaaatgaatgaaaggaagctggagctcagaataggggccagataactgtgttgcagagcctggcatccctcaagccctgcactggcctcttgcttaccactcaccgttggaacgcttgtgcagcgacagaaccttctatcataattactacagagctgactctacctggggcttctgcagtacatgtgacccattcctcactatagccctacagcagtctaggagcactacagcaaatgtcctgggtctaagtagtatactaatgtgaccataaaaatgaatatttttattaatttttggcaaatagtttaaaaaataatgtgaaagactcatcactaactgaagcgccattgacttaaacagtgtttctaggtttttagtaaaagcagagttacagacagctgcagtgtcattcagtgtcactttatacacaagcaccccactataaattcttttaaagtccagaaaaagttgatggttactggtgaactcctatgcttcctttgataaatactacattgtgtttttttttttaactgctaggaaacataggctaaattcacttccatgtgttatgcccagtgtcttaaaatttccatttccagtgagttgctaacctgtttattctgctacgtaattttaaatactctacctgaaatgtgtttgaatgtaggagtgctagaggtaaacatggtgtttggtaaattggttttgataaatttgtcaggcatagacactgtgtgatgcttcatttccttcctttcagtaaacagtgttaatgctttgccaatagtggggctcagcacagtggtcattcatggacttaagtctgtcctatcactccactaagtatgtgttcatgctgcttcacagatctttttaaaattaaactttttacattcagataattgtagattcaaaagcacttgtaagaaataatatagaaatcctttgtactttttactaagtctcttccagtgaggacctcttgcaaaacgaacagtttcacagccaggatattgactttgtcattgtcaagatgcagaacatttctgtcgccacagggatccttcatgttgccacatccacattcctcccatctgcccactccttaactcctggcaaccactaatctgttctgtttgttaattttgttattttaagaattttatacaaatggaatcatccagtaggcaacactttggggttggcttttttcatttagcgtaattctctgatggttcatccaagttgttgcttgtatccagagttggttccttttgattgatgagtattactccatggcatgaaggtaccactgttattgaagttaccttttaaagacatctgagttgttgccagctttgtgctgttataaaaaaaaagctgctctaaacattcatgtacattcatgctatgtgagcataagtttttatttctgtggaatacatgccaaggaatgcagttgctatgtttatagtattgcatagtttttaaaggaactcctaaactattttccaaagtgtctataccattttatgttcccatcagcaagatatgaatgatcaaggttctccacatcttcagaagcatttggtgttatcactacttttttagccagtctgataggtgtatagaaaaatttatatttttctgatggctaatgatgttgaacatccattcatgtgcatatttgccatctcttcagtgaaatgtcttttcatgtccattttctagttgtatgatttgtttttatactaatgagttttgagagttctttatacattctagatcatagttctttatcagatatgtggtttgcaaatacaaattttgatgtccacgtattcattgctaaaatatagaaatgaagtggattttttgtgtgctgagcttgtatcctgcaaccttgccaaactcacttaattagctctaggaactgtttttctagattgcttaggattttccatgtagacagtcgtcatgtcatctgtaaatagttttatttattttctaatctacttactttttattcccttttattgccttattgcactggcaagaacttccaggactgtgttaaaagtagtaagagaagacattcttgccctattcctgatattagaaagcgtttactctttcaccaataagtataatgttacgtgcagatttcttacagatgctctttattacattcactttcctgcacctcatcttttttttctgagcattttcattgcaaatcaatgtgaatttggttggtcaactactttttctgtattggttgatatgatcatgtgatttttcttttttagtctcttaatgtggtggataacattgatttattttcaaatattgaaccagccttgcatacctgaaataaataccacttggttatggggtataattttttttttataaaaagctaaattcgatttgccagtcttttgttaaggattttgaatctgtgttcatgagggagattgtcctataatacactttttttgatacttactttggttttggtagcagaataacacttcacagaatcaattgggaagcgttctatcttctattttgtggagctatttgtatagaattacttttaattatttaattgtttggtagaattctcccatgaaaccatctgggcctggagagatttcttttttgcaagtatcttaattctgaattcagtttccttagtagttatcaggctattcaaattatctgtcatattgagtgaattgaggtagtttgtgtttttcaaggaattggtccatttcttaaaagttgtcagatgtacatgtgtggtgctgttcatggtattcccgtattattctgatgtctgcagagtccacagttatataccttgtttcactcctggtattggtaatttgtgccttttctcctgttttctttgtcagtcttgttagaggtctgtcaattttattgatcttttgaaagaatcagctctttgtttcattgtttttctctattgtatttttattgtcagttccattgattgatttctcctattatttcctgccttctgctgacgtttggtttattttgttctttttcttgatttggaggtaagagcttaaattattaatttgaaactttttctcttttcttgaatgttcatttagtgcaatgaattgccctctcaacactactttagttgtgtctcacaaattttgatgtgttgtgttttcatttgtatttagttcatttttgttttgttttaagaaatagggtgtcattattttgctctggttggccttgaactcctgggctcaatggattcttttgcttcagcctcctgggtagttgggactacaaaaacacaccactatgcccagcttacactttccctttgacctatggattatttagaagtgtattgtttacttttcaggtgtttggggactttaaatttgttgtagtttggtttatggctaatacggtagtctattttggaatatcttatatgggcacttaaaaaatgtgtattctgctgctgtttggtggagtgttctataaatgtcaagtctttttggttgatggtgtttttgggttcttctgtcttggtgattttctgtctagttcttctatcagttgttgaaggataatgaagtttccaactgtaattgtgggtttgtctatttctttcagttttatcagtggttgcatctcaaatttagcttttttgtttagttcatatttaggattactaagttttcttgatgaattgacccttttagcgtttcataatgttcttctctgtctctgataattttccactttttgtgtatgtgctgccaaagcaaacactctgataattttctttcttccaaagtttactttgtcagataccctttttattattttttatattacatagttgtgtgtataaatctgtattttttactacctatattattatatttgtagtgagtttcttacagacagcatatagttgggtcatgttatttaatttattctacctgcctgtctttaaatcatgtatttgtacatttacatttaatgtaattattgacatagtagagtttaagtctgttaaaacaaagtctgccattttgctttttgtttcttgtttgttcactctactttgtgtttctctattttctcttttctgcctttctgtgggctaattgaacatgtttttagaatttactttttctttgtatagctttttttagtcattactctgagtgttacattacacatatattataatagactactggtgtcattgtaccaattcaagtgtagaaacttttaccttcctttacattcctttatttgcctcatttacattataattgttttaaatatttcctgtacatacagtgagaaccacatcagtgttttaatttttgctttaactgtccaaaataatttagaagactccagaggagaaaaaaagcctagtgtatttgcccatattttttacttactgtgctccttcctccttcctgataatctaacagtattcttttatggcttttttcctatttagaaggcttcctttggccatttctttagggtaggtctgctagtgacaaatattcttcatttttcttaactgagaatgtcttgatttcaccttcattcctaaaggatatttttgctggttataggattctgggttgacagttattttctttcggcattagaaacacattgtgatgctttttttctggtgtctggtttctgatgaaaaatctcccgtcattcaaattgtttttctctatgtataaggtgtcatttttctctggctgctttcaagattttttttgtcatttgttttcagaagtcatctatgatgtgccttggcaactatttgtttgcattagtccgtatggattttgctcagcttctttaatctgtagatttaaaccacttgacaaatttgggaagtttttagccattatttatttgaatacttttttagctccccacctctttctcttcttctggaattccaatgacacaaatgttacgtcttttattataatcccatgggtccctgagactctgttcatttctttctagtctattttcttcctgttgtgctcagtgaatgatttcttttttctttgttttttttttttttgagacagagtctcgctctgtcacccaggctggaatgcagtggcgccatcttgactcactgcaagctccgcctctcgggttcacaccattctcctgcctcagcctcccgagtaacccggactacaggcacccaccaccacgccaagctaattttttttttttttttttttaagtagagatggggtttcaccatgttagccaggatggtctcgatctcctgacctcgtgatccacccgccttggcctcccaaagtgctgggattacaggcatgggccactgcgcccggctgtcagtgaataatttctattgcttgtctcagttcactgatccttcctctgcctccattctgctgctgagcccatccactaagcttcttattttagtaatttagtttttcagttctgatatctctgtaggactcttctttgtatcttccatttcatcactgaggctttttattatttcatttgcttcaggtgtcttcatggtggctcattaaaatatttttatcgtggctgctctaaaattgttgtaagataatcttgatatctctgtcatctcactattggcatttgttgtttcattctacttgatatcttctggttcttgatataagggatatttgatggaaacctagacactttcatattgtgccgctgtagtccatgtctagtttaagccatctcttttatttggctttctctgacatgattccaacaggggaaggggctaggggactgctgcctcatactgccaggaggaggaacaattcaggggccctactcggcctccattgacatcgttgggggtttctttgttgctgctgggtgatgctaatagtcctgactctccactcgccctcctgtgacactgcccaggaggagatggggagggtgcccactactcccaagtgcaggtggaagttagggctctccatgtgttctttgctgacaccacagtgggggtggagggggtccacttgttaccaactgataggaataaaaggctcagcttcctacttggccttccctgacaacaccctaggaggtgtgtcgccttgttacagcctctcgagggtcaaagtctaagttcccttctcagcctttgctgacatagatggggctgggtacccctcatttttttctgtggtgtttggctacagtagaatagtcattgtctaaaagttttctgtctagctgggctgccagtattacttctcagggcaaaataatggcagagtaatgtgtcagtcatatcagagatgccactgatggtgaggcacaccagtattttatgtttcttagaaagagaaaagtatgtgaataaactgatatgtcatccatagtaagatgcatgctaatttcagagagattaatatatagtgagagtgtgcttcttggaatagattaaatatggtagttatgtgaaaaggactcatggatgaagagcaaacaatgatgtataaatattcaaacatgttttatttatttgctatgctcatgttaacaatcagtgattggtcagcttacaaaaacaagcattcctttttgagaatgttgacaagaccctttaaacccaatttggtggatctcttttccttgcagagatagagctgcctgctttgctattcagaaaggattacaggcatcccgtagtgacattaagttatttaagcataatgacatggctgacctcgagcgactactaaaagaacaagagatcgaagatcaaaaggtatgattcttttgaagaaaattatacagttcttttgtactttctaaccagctaaattatatatgaaatggtaatttgtcatgaaaacttgcctgtggatcacatttggatattaaggtgttcctgcttattaaatgtacttggtgttggagagccaagtctgattgtaattgccttgtcattgccgtaattacatatagcaaattggagggaggtaatccaagcagctttctgagagatcaagagaggctgaaaaacagcatgtgcttagtgaggcagggagatgtctactcatagctgggcataatgacaccaaaacttactaggcctttaatgacatgtacctagtgaattcagaataggcttattcataccagaataaatcatgtatcaattacatgaggaaagaatggcagcaagcttattatattaatatatgaacaaagtgaagccctttctccccaccccacctgtatcctgctctgagcagctactgcctgtgggaaatgactgcccctaacatggtctccttccagcttgcagccctgttttcagctgtttcctctcgagaacctaacataacccaggtgatggtggtttggaagtagctccttggtgttctgattagggtgaaacagaggaagtgtgttcagagcatcattgttaaaattacaatttattttcccctgatgacatgggtaagtaaagtagctcaggtctgtggttctgagcaggacaccatgatgtgtgtcttcatctcagacacagtttcaagtggactttgccagtgcaactcagtcataactagaataaatgataaaaatgctcatcacatttcttaattttgtgtattttgtgttaattttcaattttccaaatatttgcattattcatttaggattctgtcatctttgtttaggtgtcagcctaagtgcatcacttcatgaatatacacattctcatgatgaatatgcatgatcttgccattttatactaactctgctctaggctaacatttcacatttacacaatttagaaaaatctataggcaaaatctgaaaacagcccattccactgattaatttcttttacaaagtataaaaagatgtttcttatgatgatgcagtaatagaaagctagtctgttttcagtactagaactgcagtctgctgccatttgttttgcctagtattgtataaatttggaaaacatcagattcaagttttgtatgtgctctttttctacaagatctgtaagccatagaacttttttttaaatgagcaacaagaagtaaaattaaatatcttgaaacttatttctactttataatttttacttttttactaatttatatttttcttgctgagagcaggctttctaagtaactctacattttggtttttagaaatattcattttcagtttcattttcacataaataatctggtcgttaacactttgaatgttttctttgtccattttccaagcgccatggttcatgaattgttttttatcccctttcctacagggttcccataatggtcagtggatatgaacagtagttcataaaaggaatacacataactatgaacaagtgaaaaatagcctggcctcactaataattaaggagattaggctaggagttttgcctgttaaattagggcatgtttttaatagtaatagtcagtgctaacacagatgtggtgagacaaagagtgttcctatgacactggaaggagtttaaattggcactgcctttctggaaggcaaatgggcagatacattccaggatccaagtaattccatgccctttgacccattcctgtggtgctgtctttaaaaacttacgagaaatgatgtcacattttgaaggatattcatattgtgatatgaaaaagcaaatgaaggaaacaactaaatccaacattagggaaataagtagtttatggtatactcacaggcagaacgtctccattaaaatcatgtaatccgaaataatttagaaatgctcacagcataatgtttttaaaatcaggtcctaaaactacagtaaaatcctgattctgaacaaagtaatttatatgtttatacaagaaagacaaaaattatcaccgtgtggtatgattagctgatttatttaattgttttttgtacttttccatttcccaagaatcctacattgaatatttttaaatctaagaaaatgtttttccttaaagacaggcagaggtagcatgccctgtgtagaaattagggtggcatctcttcatccatcacttctaacatattgctagctccccagctttcagttgtgagttgacagagtaaagatgattgagcaacatcagtgatatgtactttttattcctcaacaaactttttttttagtgctactgctgtgggttgtaaaataccccttaaagcattgctctgatactttctaattctgatcatttctaattgtccattggagcagaaacttagaggcaagagatctctgagtaagaaggtaatggcaaactctatctgtggatctcagtattttttgcagtcccacacacctgaaccatgtacagtttcatacatgtgggagatttattagtgacttgctctgagcagagtgtgtgaaggtgtgtgttttttgaaaagatctctgccgggcgtggtggctcaaagctgtaatcccagcagtttgagaggccgaggtcagtaatcaagaggtcaggagttcaagaccagcctggccaacatggtgaaaccccatctctactaaaaatacaaaaatcagctgagcgtggtggcgggtgcctgtaatcccagctactcgggaggctgaggcagagaattgcttgaaccctggaggcggaggttgcagcgagcagagatggcgccactgcactcccacctgggtgacagtgagactccatctcaaaaaaaagaaaaggagacctctctaccccaccacctgggaacatcattggacaagctcatagtcaaattttacttgatccgataatacatcagtggggagtgaggagggaacagggttgcccctttttttgggaggtgaaggaaaacggtttgagttttttaactttttgttatggaaaaatgccaacatataagaaggaaacacagtggtatagtgaagccccctgtacccttctcccagctttgttatcagcattacatcattcttgtgccatctgttcctcaccccatcttcatgatgatgaccttcattatagttgttttgggtaaaattgacagacattgaatcacatgaatgcagccatacaattttgaccagtgattatacccatgtaacccaggaatgtcagccccattatgatgtaaaacattcccatttctttagaaagtcccttaggccccttcccagttggaggtttggagggttttgtttgtgttttaatattctcagagggcctaattagtttgtgtgtgtggcgggtcacctagctaatgctgtgagctgaaaaacgtctgagagaagatagtactgttgttcatctcaaaataacccatcacaaacactgagctttcaattcattcagaatatttttttaggaataaatcttgtaaggtgaaagtgctggggaatatgtaacagatcttgtcttcagagttactgaaatgtaagatgtctgctttttctcttttaaagaatcctcgcaaggctcgtgtaactcggcgtttcattgtagtagaaggattgtatatgaatactggaactatttgtcctcttccagaattggtaagcaaccatgttcagctgtaattttaatatttggactatttgacagatgtgccttttgtttatgaccgcttttagtgtataacgtctgcgttgctttgcgcattaggcctcataagcatattttgctcagatcagggaagaagaacaacactgaatgccagtgctggccttcaaagagtaatcaagactgctctgttgcccaggctggagtgcagtggtgtgaacacagctcactgcagccttaccctcctgggctcaagtgatccttccaccttagctttctgagttagctgggactacaggcacatgccaccacacctggctgatttttcccttttttgtggagtaggggtctcactgcgttacccaggctgttctcaaactcttgggctcaagcgatcctcctgcctcagcctgccaaagtgctggtattacaggtatgagccaccacacctggccaaaacttagctttagctttttttttctcccccgcaagacagtcttgccctgtcgtcaggctggagtgcagtggcgccatcttggctcactgcaacctcctccccgaggttcaagcagttctcctgcctcagcctcccgagtagctggaactataggcgtgcgcagacacccccagctaatttttgtatttttagtagagacggggtttcaccatgtcggctaggatggtctcaatctcttgacctcatgatctgcccgcctgggcctcccaaaatgctgggattacaggcatgagccactgagtcggccatacgtagcttttaagatccagctttatttaggtgaaatcaacgtataaaatacacctactttaagggtaaagtttgataagttttgacagatgtatatacatctgtatcactgcagccatccaccaccacagtcaagatacggaatatttttatgtaagacaatgtttatccagaaagaaaactttatccagaaagcttcctgatgcctcttggtagtgagtacccatgttggccccagacagccattaatctactttctattcctgtagattagttttaccttttgtagaattgcatatgaatgaaagcatagcttgcttttttgtttttttgtgttttgttttttgtttgagatggagtttcacttatgttgcccaggctggagtgcaatggcacgatctcggctcaccgcaacctctggctcctgggttcaagtgattctcctgcctcagcctcccaggtagctgggattacaagcatgtgccaccatgcccggctaattttgtatttttagtagagacaaggtttcttcatgttggtcaggctggtcttgaactcccaacctcaggtgatccaccctccttggcctcccaaagtgctgagattacaggcgtgagccaccacgcatggccaaaacttagctttttaatagtgaaagcagcataactgtttttagaaaccatgaccattgagatttcctttattgaggtgaaattcacataacacaaaattaaccaatttaaattgtacaggacagtgacatttattacatttaccatgtgtgcaaccatcaactttaggtcaaaaaccttttcatgactcacgaagaagacctcaaacccattaaacagtcactccccattttcttctccctctagctcccagcaactaccaatctgctttctgtctctatggatttaccttttctggttatttcctataaatggcatcatataatatatgaccttttctttctggcttcattcacttgatgtttttaaagttcattaacattgtataccatgtatcagtatttcatacctttttaatgctgagttatagtccattgcatggataataccacgttttgttttatatgttcatccacagatggatatttgggttctttctacctttttgctattgcaaatagtgctgttgtgaacatttgtgtacaggtatttgtttgaattcctgttttcagttcttttatgtatatatctagcagggtaattgctggattatatggtaattctgtgtttaacttaataaggaactgacatactgttttcaacagcgattgcaccattttacattcctatcagctatataccagggttacagtttctctacatctttgtcagcacttatattttccagggttttttgttggtttgttttagccaccctagtgagcatgaggtagtatctcactgtggttttgatcctgtttcccccaaatggctaatgatgctgagcctcttttcttgtttttttttttgtttgtttgtttgtttggccatgcgtatacctttggagacatatctattcaggtgctttgcccattttttaaattgggttgtttttttgtttttaaaagaattccttgtatattctggatactagatgtttatcagatacatgatttgcaaatattttctcctattttgtgggggtttgtttcatttatttgatactgtcctttgacacacagtttttaaaaattttgatgatgtccagtttatgtgttttgttgttgcttgtgcttttgtgttttattttaaaatctttgtttaatctggccgggcacggtggctcacgcctgtaatcccagcactttgggaggccgaggcaggtgaatcatttgaggtcaggagttcgagaccagcctggccaacatggtaaaaccccgtctctactaaaaatacaaaaaaattagccgggtgtggtggtacacgcctgtaatcccagctactcgggaggctgaggcaggagaattgcttgaacctgggatgtggaggttgcagtgagccgagatcacgccagtgcactccagcctgggcaacagagcgagactctgtctcaaaaaaaaaaaaataataataataatctttgtttaatccaaaattatcaagatttattgctatgtttccccctaagagtttatagttttcagtcttacatttaggtctgtagttcatttgagttcatttttgcgtatgcgttgatgaagaggtccaattttattctttcacaagtggttatccagttttgcctgcatcatttgtttaatgtttccccattgactggtcttggcacccttgttgaaattaattgaccatagatgtatgggtttatttctagactctattctgtttcattcttctatatatctgtcctatgccagtaccacactgtgtcaattattgtagctttgtagtgagttttgaaatcaggacatgtgagttcaactttgttctttttcaaaattattttagctatttggggtctcttgaaattccatttgaattttaggattagcttttccatttctgtaaaaagtattgttgggattttggtggggattgcattgaatatgtagtcacattgggaagtattaccatcttaatgatattaagtcttccagtccatgaacttgggatttttccatctatttagatatttccttcagcaatgttttgtgatttttagtatatacgtcctgcacctctttggttaaatttatcactaagtatttgatttttttattctactataaatggaattgtttccttaatttcctttttagattgtttactgctatttatagaaatacaacagatatttgtgtattgcttttgcataatgtaacttctgctgaatttattagctcaaataatacttttgtggatcttattctatgtataagattacaccatctgtgaatagagataattttacttgtttcttttcaatttggatgccctttatctttcttgcctgattgccctggctaggacctcgactacagtgttgactacaggtggcgaaaatgagcatctttgtcttgttcctgatcttataaggaaagctttcagtcttctaccattgagtatgatggtagctgtgagttttttataataaccttttatcaggttgaggaagttccttcccatttttaatttattgagtgttttatcatgagaggttgttggattttgtcaaattttttttctgcatttattgggatgatcatgtggggtttttccccctacattcttctaatgtgtatgtaatacatatttgatttttccatgttgaaccaccattgcattcggccattgagattttaatctaggagtctattaattgaataaggattcaaaataagggttccatatgttgtttttaaatgttttcactatttctgaggaaatctaaatatattttaagtatcaatagaagagatgtatttgttttcttctttttgtttttgtaagagtgtcaatggttgatagaataatgggagggaggtagtgaaccagaagatactaggacgtatattatagggctacagtaatgaagcagtgctaatggacagatacgaaactaaagatgaagtgtaggaacagctcaagtgtagataagcactgaagctgggcatggtggctcacacctttaatcccaacactttgggtggcggaggtaggagaatcacttgagcccaggaggtcaaggctgcagtgagccatgatcctaccactgcactctagcctgggtggcagagcaagactctgtctcaaaaaaaaaaaaaaaaaaatcagtattgtgctgtcttttgttaagtgaatcattttagaccatctaaaggacaattgattctcatcattcaccctacttatattctataaagttgccatgaacactggaataagaaatactaaactattgctgctagggcaaataatagggttaggttcctctgagcctctggttacaacattttcatcaaccagttgacacaaaacttgctttatgtgtatttttgtttaaaggtgtcttatttaatgtctgttgattcattgcactaccactcatgcctgaacaaagcttctctaacacacaaattttctccataagggacatcacagcactaggagtaatagacggcactttagcatgacacttgggggcgactctaaatagcaaaatcaccaacaaaaagcacagaagtccaaaaaagtggcagtaaataggccatgaaaagggtagttgttcacaggatcagagctgaaacagtcgcctgttcaccctcacctgggaaaacacgtgtcaggtaattcaaattcttcactgctctgcacatgcacatatccgtgatgacaggaaaaaagtattgatatggaggttgcaaataagttttaataagtagatgaatttgcacatatagaattcacaagtattgagagtcagctgtacatactttttaatcttaatttttttctccataatatgttctatatggtgctaatcattagtattttaacgtttatataacacttaggttaagttaaaatacaaatacaaagcaagaatcttcctggaggaaagcctttcatttggagtcctaggagagcatggccgaggagtcactgaacactatggaatcaatgtaagttccccttttttaagaacgtttcccctcttataggagacatgtagttccattctgctaggcctatatttttataggcacaagacagtgttccttatcagtttgaagggtcacgaaactttggtgtctgtcacctcagtgagcccaggatgagtctagtcagccagaccagggaaccccatcttccttctgcacttataaactcggagtgggtagtcatggtttgtgctctgtttgcaaagtttcattcgaatagacttttagtgtctcttctctagaaatggttaaattttgccttccaattatttcttaaaatcattaggaatttcctgagtggtcttttcagaagtattcatgacggcagagaaaggatactgtttctggtgtttaaaaatctgtattctatataatgtgtttgtgggaggtagatacagttacgcgtgcgtgcgtgtgtgtgtgcatgtgtgtgtgtgtcagaaacaccactggcatgcattcagcaaaacctcttaaagtcccaaacagaatgaggtgtcatgtttccttttctgagggaaatggacccagactgcccgcagtgcctagtgggttttgctcctggagcctcagggcagaggaagtcagccagtcttgaacagctgtcttaccaaccaccatgggaagagttacagaaagctttttctccaaaacatgcgcataagagctgtgcaacctgtgttacagagttgaactataaaacgtaaaattgccttacattatcgacatcccgctaaccatatagtcccagagaaaaatgtaaagcagagtgaatatcccgggaggttggatggaagcacctcctccaaggcagactgacattcagcagttacatgcaccgaggaggtaaatggaataaatggaaagataaatggaagtgtaattcaagcagatttagcagtacactacagccttttttaaggcatgaaaatttttatggaggaaaaaacttgaacttcactgttgtagttttgtgaatgcttccagcagttgtcactttgggaaatactgtgaggaaatactcacaagcgcctgagagtagagagcagaatgtacgggctttatttggatcctgattcaaacaaatgctgttaaaagaaaatttggtgagacaatcagagatatctgaacactgaatatttgaatatatttaacatcaaatttaaacttaacatttaaaaattgttaatgtcttaagtatgatactagttttgtgattatgttttgagagagtttttatcttttagaaatacacagtgcaatgtttatagatgaaaccccatgaagtctgggactcactacaaagaaatgatgagggtggtaggggatataggtgaagcaaggttgtccttgagttgataatgtttgaatctgggtgatggggattctttgttctgttctactttgttcaggcttgaaatttttcataatgaaaggtttaaacatgctttttaaaaagggcaggagtgcagagtttctcaaaactctgctggatctatgaaacactaaggaaaacactagctgtgttctgacaatccattaacatggccatcagtaagtaatgattgaatgcctactgtgtgcccagaatggaacttggtgctgagggctggacccaaagatgaggaccgaaggagttctgagtggtcagaaagatgtaggactcaaagcccattaggtcattttagagcacattaggttcttctgctgtccagttggtcaaagattccatcgccatgacgtttggataaattgacttatgaaatgctgagaggcaaactgaatacaagaataaagtgctcaaaacttcgatagactttttatttatctcagtgcatcccatgaggaaggccagctagaccactgttttagcgaggaaatagtcttattttgtacctgtgactacttttaatatcgaacagctttgggttttattttcttataatttatttgtctttgctgtgagttaatttgtcatgtataatgaaatggtaaaaatgtataaaatgagacagtttcagatgggccatgagactacagttcattcagcgatagatgttatatggtttattttttattttcatgtagataggtagtttgaatccagatattaacagacagtttaatgctgttaaattttgtctctaggcttgaagttggccttttttttctttaaactgtggaataactgtcactcctccttttccggcagattgatgatattgatcttatcagtgccaacatggagaatgcacttgcttctattggaggtttctgctgtggcaggtcttttgtaattgaccatcaggtgggttctttttaaaaacaggagctaaaactgaaactaatttctccattggtcacctcaaaatataattttgaaatacgaaattttacttagtttatcacacaatttttatttaaatgtcaatttttaaagaatcactcaaaatatttctatttagaaatgatctcacatttaacaaaaagtcttgttgctgttacacgtataatgtttatttatggctggatcttacccccctcaccacatgtacacactgttcagtagttgttctagagaactggtgcctttcaaatgtttacctagaaaggacagagaatgtgtatatgtcttcatttgtttcttctcagcgactttccggccagggatactgcttttcagcttcgttacctcccctgttagctgctgcagcaattgaggccctcaacatcatggaagagaatccaggtataaccctttaaaaacccaaggaatcaaagagatttcaggttacgttagttgtgttactgatttacttactggagaaattatttgccagacaaaactggtttgcagttacattatatggcattcataggaagaatggcagtgaagaagctattcctgccccaaggacttggggtcagagcttttctcctgtgcttggggccagagccagagccaaagcaaggctagctcagatagtgggtggagatgctgggaggacgaggggctctcagccagttctgggcctaaacgttccattggtgtaaataagccagtctttatttggttaatagttttttgagaaatcagctgaagcatgctgcttttttatctgtgcaattttataaatattgtgagttttcacctttagcctttgaatcatcagttggtactgaggccaagccgggtttaccagcaaagaacttactcagtgggaaaaataaaaagtctactaagaatttaaaatgtggcctttggctatgacagtgccacctttgcaaagcttaaaacggaaagggagcagcaggccctacccggtacagtatttctgaatcttcatcactgatactaattcagagaaccagaaaatgtgtgtctctgtgctcattcatatgcttgcttctcagatggcctggcacgcctaccttctgatcagatactttagttttgggattttccttgaataaaaaaggaaaatatcaagaaaagattgtaaaaattactttactatagttgattttttaccaaattgtttaggataaagaaataagcaataaatttgtaccctttgattcttagccagattaggatcttgatgagaacaagaggcattgattgttcttgaaagcatcattccaggtttgttgaaagtgggatactgaggtgagaaggggccagttagcacgcaccagagacaaagcttgggccttcaggggagtatgggttcttggctctgttagtatgtagaaggatttgtagcattttaaattgatgaacttgatctgggtcttcaaaaatatttttaggttagtactatcataagtttcaaatagactctcaaacgtatttttttcatctaggtatttttgcagtgttgaaggaaaagtgcggacaaattcataaagctttacaagggtgagttttatatattttcaaccaacataaagtttatctgcaccacacttaacaactaatggaaagttttaaatttctaggcttgggtcagtttgaccagattgcagctaagaaaccaaaaacttagttcactcacattggtttatttgtgtaaaaccagatcatctgttttaaagaatcgtgactttgtttttctgaaaatgaaacaaactcattaataaaatattacagcagtacagaagatagaaagatgaaaataacaacccaacatcttaccaccagaaataaccagggtaaacactgaagcatctctccatgtctgcacacacagggatgccattatatattatgtaattagatgactgggttcataccatctgtgttactttttaataaattactaagttttaacacaagaaaaagaaacaagtgaaattttatcagtgttttttttttttttttttttttttttttactacacaagagtcactttttttttttttattatactttaagttttagggtacatatgcacattgtgaggttagttacatatgtatacatgtgccatgctggtgtgctgcacccactaacttgtcatctagaagagtcactctttaagattcctctgtagttaaaaaaaaaaaaaaatggaggttggtgatatctccaggcacatttctggtcttatataaagtgatttcacattgcccgaggtctttctttttgcctttcctaaggttaaacatgctttcttggtcatgaaagtcctatctgtgttccggatatggaaactggagacttaactgaaagaaaaggacaattgataaatgagtacatcacagctgttccagataaagaaggggcagagacattaaagttctgggtgtgtctgtgtgatagtaacagcagttcttgcatgatttatggtagagagatatatttgtattggttccagttccattggtttgtgaaatattaatatgccaacacagcctagcatattggagtcactggaaatgcatcagtgctagccttacatgcctttcactctatggtgttaacctgcctttttctaagtctaatctccacttaccccagctgtatcacactttttctttccaaaattcctaatcctctgtcttcactcccctcacttttagctaacagcctggccttatgctgtcacttgggactctgtcatatttcctgacaaatctacacacctgtgggtatctgaaccagtcttccctcctgtagaccagtaaatgttgctccaactaccacaggccctttttttaaggactgagtgcctttgcttgtccctgctactttgtcatcagcctgtcccctttcttgtgttatttgattagcagtcatgtccactttaaattcctcttgcctgtcacctgacgtttccctctgcaactccccatgtctttgctcctctcagtagctatcatctccacgtcttcacttacactggcagctctgagacctggcttctgctactgcccttcgcctggactgtttttgtggaggtctccactgactgctgaatccagtggaccatcttcagagctcatcttcttgatgtccccatagttttcagcacaggtgaccactctttccttctttggactctgctacactgcacgcctggatttccttttacatctttgaatggctccatctcggtctcctctgaaggctttctttcaacaccttgctcttcaaggctttgtctgtgcttctcttttcttctcattaccttcttgaagaattgccttctcccacacctggagctccacatcgtttcatgacacctgtatagagacagctcccagcttcgtatcaccaccctggaccactgcagctgcaggtctcacacccagttgcctactcagtatccacagttggaagactccatggcacctcacagtaaacacacattcataagggtcgcaggggcaaaccgtgctggtatctagatggttacagagaacagtaaacaaaatagcaaagaggccaatgtgacaggaggaaaggagtgggaaatctggtggaagatgagggctgggtcatgggccatccgcacacagggacttgtgagccgtgatgaggacattggcacacagaggaagccctggcatggttttgagcaaaaaagtgaaacagcctatctgataccctagcaaaattacttttgcatggtgtgaaaaaatacattgaacagcagtaagaacagaagcagggagaccagttaggagattgacgcaggtgaaaggtgatagtgactctgaccatgttgggagccatgacctgcgaagtgtctggattctgggtatcttctgaagggagagcacactggatctagcagaagttcatatgcagggtgagtgagaaagagaagactccaggtagagctcagggggtttggtcagagtaaataggtagagttgctaatgagtgagagggacagaactgtggagaaataccttctggggaaggtcagcagtggttatgttaagcccaaagtgcccatcagacatggagtgcagagcagcagctggatatacaagtctgaagtgtgagggagagtactgagctagagataaatgtttgagtcttggggtatggatattatatgaagcatttcagtgtgaagaggtcagaaactagcaaagactagtctgagaaagagtggccagtgaggaagaggcaggctggaagagcctagagtcctggaaaccagggaagaaattgcttatgtaggaggtcagcctgtgacatgccgctgctgacaggccagaccagataacagaacactgatcctttgacttcgttatgtagaggtattatgacttggtgagtagtttcaggggagtgtggggtaaaatgcctgcttgaaggaggttccagacaggtggacacggcctagatgactgttttgaggagtttttctctgaagagggactaagaaacaagatggtggctggagaaagaaattggtcaagagaagaatatttcagtttaagattactgagatcaatttctgaataacatctggctaagtataaaacatcctttctcctactggttgacagtactgtatcatataccaggttcccatttgtacctagatctgtttttaaactgtctcttccattccattggtatatttgctcattcctcagactcttttgattttgtctgtttttatcactgttttggaatacaggtttatcactagtgtctgtttttatcactgttttggaatatgggtttctccaaaattattgctagaatcttaattggaactgcattaaattttctgatgaatgtggagggaaatgtcatccatgaacatgagctctctatttaaatctccctttgtgtcctttaatggaattcctataaagcccttgtacctttatggaacctttaaagggaattttcagacatcctatagattttgttgctgttatgaatggggttgtcttttctgttatattttctacttgattattgctgattcataagaatattattattttctctaaactgaccttatatccaggagtctttctaaactcttagtatttccagtaattgtttcattgtgttatgatgatgtgcatggaagtcctgttatctgcaataatggtgttctctctttccttcctaatgcttttgcgtcttagttcattttcttattttattgctttggtctgagtccctaatttgtattgaacagtggcaataatagcaaacattccttccttattcccagtatagaagcacttcttcattaagtataaaacatcatgctatgggtttttggtgagtagcttttattgaattattcctagttttgttttgttttgtggtttttttaagagacaggattgtgctatgttgcccaggctggagtgcagtggctattcacagatatagtcaacacactatagcctcaaactcctggactcaaccaatcctcctgccttcaccttccaactagttgggactacaggcatgtacctctgcacctggctaaatgattcctaaatttgaaggcctttttttaaaatcataaatagacgttgaactttatccattttttttacatctattaaggtaaatcataaatttgtcttatggctgaattacattgaaatattttctgatgttaaaccatccttgcattcttgagaaaaccgttacttcattataatatctttttctacactgttagatttatttagctaatattttaatttgactttttatatctgtttataatttaaatggatctataaccttgtaccaactttacgtaacataggagtcagtgttagggtagcttcggtagatgatttggctattttccactctttctgcttcatggaagcactgagtaaaacaaggcttgatcgtttcttcagaagttgagagtaggtctcccactttacagccatctaggcttggggcctttggtttgggaatagttgttgattatctctcatatatctatattattttaactttttatttatgtaaatttggttttgtgtgttttcatcatagtgtgttttcttatttttatgcactgtctcattgcactgtgttcttactcttcttcagcttcttacatttagcttttggttttatttcgtattttccaataaatatattaaagataaatattttcaaaggcagtatcttcaatgtttagttctgagtaatttttttgttcaatttttctctaatttctcacttctctcatctctgagattgagtttgggaaaggaagtcaacatcctatgctggtttgcctctgttttcattgtaatagagatagttattggtgtcaggttctccctatagactgtaagcacacagtggagaccgtggctaccttggtgattgctctgtccctgggagctagcccagtgctcgtttatccactgggataagatgatatgtttggcaaagtcttttgttaaggaatagtataatagactctgaaacacggcttcgctgaactcaagctataactgtgtccgtttggttttaattaaactcatctgacattcagcatctaggcaaccagagacagggcattttgtttaattccttctctcactagcatgtgaaatgagaccatttgatcaaaaagcacaagttagatctggacctcaggtgccttgtatttcttttctttttttttttttttcttttgagacagagtcttgctctgtcactcaggctggagcacagtggcgcgatctcagctcactgcaacctccacttcccagattcaagcgattttcctgtctcagcctcctgagtagctgggattacaggcacgtgccaccacacctggctaatttttgtatttttagtagagacggggtttcaccacattggtcaggctggtcttgaactcctgacctcgtgatccccccaaccttggcatcccaaagtgctgggattataggtgtgagccatcgcgccttgtatttcttgaggaaaattgaggccatttgattcatatgaaatgctatttggaaagcagttttttttgttgttttttttgttttttgcttttgtttttgtttttgttttgagacagagtcttgcttttgttgcccaggctggagtgcagtggcacgatctcagctcattgcaacctctgcctcccaggttcaagcgattgtactacctcagcctcccgagtagctgggattataggtgtccaccaccacacctggctaatttttatatttttagtagagacagggtttcaccatgttggccaggctggtctcaaactcctgacctcaggtgatctacctgccttggcctcccaaagtgctgggattacaggcgtgaggcaccacacctgactgaaagcaattttttaatactgtgagaatacatgacctttaaaaaaaaaaagatacttgatatatgcgtttaacatggtcagaatttacacaggaaatgggttttcaaagtgtattgcttagtttctacattagtaaagaactaatctagaaggttcccccacattccacatgctcaagattccatgattcagacctgtagcctgctttattgagagatctagcatgatatatttatatttaaagaaaggagacgctaattaataatgttccaagggtgattggaaggccaggtcagatgagtttccagaattcacattattgtaacacacagtagtcattctgtaaaggcttgttgagtcctaaactgggaagatgccattgtgctacctagtactttttattgtcatttcattctgagggaaaaacaaatcgttttaggtgaaacaaactaaatgaaaggaatctaaaatgtttagctcagtttcaaatagacatatatcacatttgtgtcctaggaggtaggtcaaaagtcaaataatatttgttgttataggataaaatagactttaaatgaacctgactagatagtagccgagatcgtgccactgcactgcagccagcctgagtgacagagcgagatgccatctcaaaaataataataataataatagtagtatgacatagcatctcatggcagctgtagtaaaaatacaggattaaatttaatttaatttaaaaatacaggatttggcccctaaagatctatctttctccttgagaagctacagatttttgtgctattaatcctaagtaaaaagaaaataattttaatccaagtaaaatctaaaacttaacatgcaaataaggacgtttttctatctaaacatattgctgttagtcaaaatataaggtatgtttggtatttgttgagtttttctttgagacagagttttgctctgtcacccaagctggagtgtagtggcacaatctcagctcactgcaaccttgacctcctgagttcaagcgatcctcccacctgagcttcccaactagctgggactacaggcgcaagccaccacactcggccaattttttgttttttgtttttgtttttgttttatttgtagagatggggtataatgttgttaatgttagaaatcatccctgtaatttatgagagacaaaaactgaagacatagataataagcaaggaagcataacataaactgtagtgagtagcttgtgaaggatccagacaggatgaaaaatagcaaatgatggagcagagccttccctaaagtgggtgatgaagaaggccccagcagcaggcagtgctggagctgggccctggcacatgcagccaacacagggaagaacaaacattgggggcgagggagcacatggcaagggaatgacaggccaaggtggggcccagagggcctgtaaggaggcacagactccctggtgggaggctggggccatgagacccggtcctgcactcaggaagccacattgcaggcagacttttttagatgaggaagcactgcccagagtgcctcgtttccctttctttgttggaattggaatgatgcttcccatcagtcgcaagcttctgtacgttcactgtgccttgacattgtggacttctaacattatttctccgtgagcgatcttcaagcctggaagggacttacagctgtgtgtgtgtttcccttcttcagcatttctggattaaaagtggtgggggagtccctttctccagcctttcacctacaactggaagagagcactgggtctcgcgagcaagatgtcagactgcttcaggaaattgtagatcaagtaagtatccgttgacttgaggcatccccccacaccacttctgcccttgccccaagcaattttttaatgttaaatttttaagaaaagtctctttgccctgagagagaagagggtagaaaggaagatgctggtgacccgctcttgacatggaatcctaatcctccaggtccttcctagcttctggccatggtaacaggcagcaggccctcccattgggtcaatgtgtggctccctccaaagatattgtgttttgtaccactttgcatttaaatatacttggcctctcctctgaaaaattagccttgcagaaaactcacttgctcaccattttacaaagccaggctttcctatgtgtagttgggggaggcattgtgtgtgggcatagcacacattcctggacggctggctgtccccgcagcacagctcagggacagtccactcacagtcaccctgaagtcaggatgctcttgtaaacggaaaggaagaccgctttttataacatacctaatttggggagatttatttaaatttctttatcttccaaaagttattttactactaattgtctaagaaacacatcaccagggaaaactgcttgccccttttcatccagtagcactacccctccagagtgcttcctgccctgggcacgcgggtttacagtggttcagagccaacagaagtttctttaaaagggggaggaagagcagcggaataacctgggcaggaaggactcaggacgggcagtgggatgccacccaccttgcacccctcttccaagtcctgggatgctggacatctgctttcagaagaatctggacttttatgtgggctgctgctgctcctttgagaagaatctgacatatacctagtatgtatttgagaatgaaaatgggcatgattctgcttccttgtccagaggctgtagctatgagcaatgctactaggtttctggggtcataatggcagctaccacctgtcatgtgcctttcctaggccaggccctgtcctgagcctcatccgcctagacagcctctcaggcaggctcttctaggccacatggctgtgcagtatacagaccgggtgtgcaggcagcctctgctgcctagctggcttcagctgtcctatgtcccaaatgtttgagccacgtaatctggaataacagatttgtggagaacttcataaaatttgtggtcttctagagtcaattacattaaaaaataaataaaaagccccaggatctgagcttcctaaggaaacatgtcagattatgaatgatcaggctggagctacttatcttgtgaggtgaggaaatgcagctgatgtcccctcaggcacaactctgtggacatgaagactctctagacagggaaaaacatcccactgcctgctttactgcctcattgtttgtattgtaacgttccttaaatacagacaaacacaaaactaagtatgacatctttgtgattagagttctcatacaaatggaaaactaaaacgcatttatacattaaatacaaactaaatggacaagccagtaaaattcccattcatttcattaccttcatgaggcaggtgaatttgtttttttcaatggacttgccccagcgggacagctgagagctgtgttcacagagcaggctcatgagctgcatgcgctggtgttgggtctgagtaatggctccgccgttctcactgagtctcttctcgaactgcatcaggacagttgtccacacatgcttcatgttgagggacagttgcctccttcagatgccagtgtattcattgcatagtaaatccacctctgttctcttttcattagatagcaacagctaaagtcttactactgctttgtaccaaagagacgcagaggaggacgtgcgaatgaagcaactcggtgttaaaataccatgcttacaggaattagccacgtaatgaaagaggaaacgaaaagtctgtggacagctcacagatcccaaactcctgtctgtgggcctggtttgatactggctctcttaaggaaatcctcttgagagttgagtgagaagagaacaatctggggtagggaacagaatactatctagaaacttcattgatagaaaaaatacatatatcttcccgcttctgtgcatcatcacagcttccatttttaaaatcttccgaatcttttgttccactcccctcatcttttcaatatttgaaggaaagaaaagaaccatgctgctgtaactcttatttaagctttgtagatctgagaggctttgccaagtttatgttgagttgctcaacaggacactgtttttacaaactgagctattgtttataatgtctcttaaccagccagggctagaaacagagccagtccagatgtttgcaggagttcacttttccaagtacacttccagagcctagagtcagcgggaggctgttgtcattgcctagtatggtttttccatctcttcctcgcagcctacgacgtgacccctcttcaggcagatacttttactgccagagacatggaataattgttctttcctttacactgccctttgctctgttgctatttttttttaatataactcacataccacataccataaaattcaccctattgaagtatatcgttaagtggcttttagtatcatacattcagcaggttgtgcaaccattactatctcattccaaaactttttcatcactccagaaagaaacccctgtagcctattaccttgctctggtgtttgtgctttctttattttagtagagattgttttcattttttcttaatgttgacagatggttaatatataggaaagctgggtaaaactttgttaacgccagattctgcagtgcccagtggcaccatgcccagatgccacatgtggacatcgtttttgctaatatctgaagtgcagtggtttttctctgacgcagttctactggtggtggtggtcataagtccagcctgcaggactttgctcgcaccacttcctcatgtgctaactctgctttgtctaaatggtagtcactagctagctatggctgtttgaatttaaactaagtggaaataagaaaaggtgcaactgtgacctctcagtagcaccagccatatctccgtgtgctcagcaggcacacagggctcatggcgactgctgggcactacacaacagaggtatttgtcattgcagaaagttctgtggacagtgctgccaaggtggtggtgtagtattttggtgatatcttctagcaattataattggaaaagtgaattaaagctaccgttgcaggatttcagcgttcccccagtttaattaccaccatgtctgaagtccaggttgcagatgtcttctttttcttcctacagtgcatgaacagaagtattgcattaactcaggcgcgctacttggagaaagaagagaagtgtctccctcctcccaggtcagttgacgttaaaatatgaccttatttttttcccctactctgagctctatgaaatacgttatcttttgaaaaattttgaaagactatcataggctatggaagaatatctgtcattaaaatatagtacattacctgtcttctgctcttaaactagaagtttctaaaattttaactgaaaagctcccaaggactcactgagtaccctctcagttaactcagagaaatgtctgggagcccagcaatgaacttgggcaaactgagtttccatcagctcatatctgccacatctgaaaggtggcacatgccacaccaggagttcctgccacaaggaccgtcctgcagggaagatcggcagtgtggggtgggggtgggcatgcgcctctgctgctccttcagtcagcaacactcagtaacatttgagaaaaaacaagcaacagtggggaaaatgtacagcatcaagaaaaaacaccaaaagtgaaagactaatgtcttacttttaaggagactggattctgttcacaaagcatatacgaggtagtccaaggagttggccatcccaccacagcactgggccaggcagtcacagcagggggcatggacatggtcagttctgccctggggcattgctcaggcttttgagagcaggcgatgtctacaccaaaactagagaagtgtgtgtgtcgggcatcctgtgggcatcgtggctttccatcagatgaggtggtgtgtgctttgctcagggttttcagtggcttggagacctccaggttcatctgggagtacagagtgcaagccgcagaagagctggagagaagggtcctgaggccaggtgccaagtcagggaggctgcaggagagcccactggggagtttgaatgctctgccggcccacagtgccagaccaggatttggaagatcactctggtagcagctcaaagcaccttaaggagcctgcccttttcagccaggtgcagtggcccacacctgtaacctcaacacctgggagaccgaggtgggcagatcacttgagcccaggagtacaagaccagcctgggcaacatggtgaaaccccatctctgtaaaaattagccaggcatagtggtgcacgcctgtggtcccagctacttgggaggctgaggtgggaaaatcacctggttccaggaggtcaaggctgcagtgagctgagatcactccattgcactccagcctgggctgcccccttcattttttattgcactcatccaaaggtgtaatcctacatcctacgtttacttgttagtaagaccgtaggtgcatgaggacgggagccgtgctggttttgtgccctcaggactccatgcacagcatagtacagctcaataaatatgtgtcaaatgcatgaaacagatgtttacagatgaactctgggggacagaggtagcattgtcctttcaagctattatttctttgatttcctgaaaacttgaaaatttctgccatgccttagagtattacagagctttcacattgctattgacataaatacgaacaatcaaactgtcgttgatttgagaaggatggaattcctgctttgtgcctggcactgcctgaagcagtacatgatggacaggatgctatttcccagcttctgaggcagagcccacggaaactcactctgactgggtgtgcactggtgtggtgtaggccgaggccttcaggctgcagattccctgccgcagcaacccacctgccacagtagtgagaaagtgactgtgggcagcaggtacatgaatagacaggcctattgggaggactgccaggagaggtttgtttacaaaaataggcagtggatttggctctcaggccatatatggttgactgtgagtgcagttcctcacctcacatagataattcttttttctgtttgtttgtttttggtttttttttttttttgagacagagtctcactctgttgcccaggctggagtgcaatggcgcgatctcggctcactgctagctccgcctcccaggttcacgccattctcctgcctcagcctcccaagtagctgggactacaggcacccgccaccacactggctaattttttggtatttttagcagagatggggtttcactgtgttagccaggatggtctcgatctcctgacctcgtgatccacctgccttggcctccaaagtgctgggattacaggcgtgagccactgcgcctggcccacaaagataattctttgtgtcctttactgttctcagcattcgggttgtggtcacggtggaacaaacagaggaagaactggagagagctgcgtccaccatcaaggaggtagcccaggccgtcctgctctaggcagagtcccgggaccatggcctcctgccacacaacacgcagagaggactcaagactcccgctggccatggagtggcctgaaagagagcaagaacatgtggatctttgataggattgttaccaaatggtgtcagtatggaccaattgtgtgaccatgagaaggatgcttattttttttaaaaagaaaacacatctaaaagcccaggaactgatttttttaagaggaaaactaatgacagtgtataactgatgtttaaattgtgcatttagtactatttaaatgttttcttatactagtattttatattcttttgttgtcgtttaaaactggagcttcagtgtctcttccctccctctaatagtaatggttcagtaagcactccttaactccttagtatttcatagaaaaatgactgcaacattaaagctaagaggaacacttcaacatatgtggtacaaatttatattgaagatctaaataaaccacgtattttccagtcttcgttgtgtgaagctaaatggtggctaaaaggaacactttttgtgtgattattataaactttgcattgtatttgaatcttagaacttttgtacacactaaatattgatgtcacaccatttctaatctgagcatccttagccagagaatattcattatacttcctaagtgagcaataatttaaatcagaagctattttattttaatgtaattaacctttctttacatttcttatgtgttcacctctaatctgttttaggaagagagttggttattatgttgatcccataatataaatcatatcctttatattttagaatatctcaaatgtattccttttttgtatggtgggtttgcctagggacgtgtaactacaggcttttactaagccaaggaaaaagagaatttttcttttcatcttacaaattccagatatctacaaaagatgtgaaagcactaaaaataccatttttaagcagtactttacctgttttttctttagcaaaccaggttatgtggtgtaaaggtttgttatacgtgccacaatatagcatataaatattatgccatcattccttctcttgttaaaggtagaagaataaaattgtgatttttataacctgtgcttattactcaaatggtcttcaacatctttttaaacaacacatactttttgaatgttcagtttctattttgcttgaggtattttgtacatatgtgccttgtgattgctgctgctttaaaggataaagtactctttgggggatgagtctggtttgttttgttttattttttaatgaaataaacctatattcctgattatta

SEQ ID NO: 15 - DNA, 127280 bp, Homo sapiens
ggattgtgggctgggggctgcggcggcctccggcgctgtctccccgcacccgaccgggccgagccggctgggccggcggggtgagggaaagcagtggagtcgggagcagaagcgctagaggcagtggtcgtggcgcggcggcggcggctcccctggaggccggggatgtgggagaggcggtggcagcagcggcggaggcggcgctgcggacccgggggaaactgctggctgacaggacacccgggagagacgtgagggagccgccgctgccacctctcacccctgagtgaagctgggctcgagagggcggccctgtgctccccgggccgactggccagcgggcgcggggcgggggcgggaacccgggctcgggcccggccgggcgccgggcggcggcggccgtggagcagcagcctcggtgcgacgtggagggctggaggcggcggcgatgcactaggcctcgctcagggcggctgccccgggacccgcaggtaggtgtgccccgcggccccccgcgcgtctcagcccactctcaccccgacctacagcggagagagggaccgagaccccaccccctcggctctcctccccagccccaaacggaccgagtttcggtcacagctgaccggcactgaagcttccatgctcctctccgccacttccttttttttttttttttttccttttcactctccctccgggatcggggctggcagctgtgttccctgcctcctgtcagcgaccgcaaacgccgctcttgcccctctcttatctttccgggatcccagctctggaacttccatcacccccttagacgctgcccccaaactttccttttctttttccagccaggcccttagtcctattggattctactggaatcgttaaaacatttgtttgtttttctctccggggaaggctaacccaaagagttactcagtattttgcattttggcaatgtagcttgaaataatttgtgcaataattttcttcagttctgcctccttccatctctgcatagacagaaagggcaggccctctctgccgtttctgctctcccgtcgttgacttgggaactttggcttgccaattataattagccgtttggtctgttcatgtgttgagttcaagatggtatttttagcattttgactgacaggcgtttcaaaaaaaaatttttttcttctaaccagctttattttttggtctttattgaggctctttcgaagaattaaattgtttggactgtttttgtttttaattggctgtatttctgatttgtcaaatcaagggcggtcttaatactaaacgcctttaagtaataccgtgataaattacttgtagtataccgagaaatattactgcgataacctaaactgcagattttgatgtacattcacttttataaatccgaaggggagttctaattggaaaaagcaccttcagagcctaaatgatttctaagcagttaaatgatggaacagagggaatgatgggatttgtttgactgtatttgtagtgtagtcagaatcggatttcctagaaatggatgttgatggttcgtagtgctcatcattgcttatgataggttaccagtagctgtaattgatagttgtttgggacgacagtagatgtttgcgattttattgtaatttggctatttttaaattatgttctgataacttaagaattattacactaccaatctaagaggcagtctgaggatcacttttttaaataaatgaaaaatgttttaatgggtttttaaaataaagaatgcatcacaaccaaatcgtaaagactgttttgttgttgatattcgtatattttgttcttgtagaagtattgttactacagcatttggctttctgaagtgtttttgaaattagaatttaatactaaaagtttactaggaaaaggtgattacttttgcatatgcttatattttctggaaagttaaaattgatttctggataagataattttttgtgtcagaattaaagtcaattcctatatagcccatgaaacggcaaattttgcagaatttcttcatcacactctttttttttgtttcttttctttttttttttttgagacggggtcttgctctgttgcccaggctggagtgcagtggcgctatcttggctcaccgcaacctccgcctaccggcttcaagtgattcttctgcctcagtctcctgagtagctgggactacaggcgcccccacgcctggctgatttttgtatttttagtagagacgggggtttcaccatattagccaggctggtcttgaactcctgaccttgtgatccaccggcctcggcctcccagagtgctgggattagaggtgtgagccaccgccccggccccggcccatcacactctttttttttttttttttttttttaatcaacaaaagttaattacaattcctctttcctgctctttgctttttaaaaactgctttattgagataaaattaacataccataaaatacacccatttaaggtgtaccacttggccgggttcagtggctcacacctgtaatcccaccactttgggaagcctagtcaggtagatcacctgaggtccagagttcgagaccagcctagccaacatggtgaaaccccgtctgtactaaaaatatataaattagccgggcatgggggtgagcgcctgtcatcccagctactggggaggctgaggctggcgaatcgcttgaacctgggaggtggaggttgcagtgagccaagatagcaccactgcactacaggctgggtgacagaacgagactccatctcaaaaaaaaaaaaaaaatatacaattcagtggtttttagattaaataattgtgcaaccatcaccataatctaattttagaacattttcatcattccctcaaaaaacctttatccattaacagttactccccattctcttcaccccacccccagctttaggcaaccactagtctactttctgtctcaatattggcctaatgtgggcctttcatataatgcttcttggctcatagcttcttgaaaagcttttcctttaaaatcagtgtacatgttaaaattttttatttgagctagggaataagcaactgatcaccaatattaaaagtgatgttgtaaataactgatacactttttggttgtattcagcataaagttggagaaggcatgaatggcttcagtaacctcaagaggtagtttggtcagctcggaatcaataagtaaaagtgggcatttttgtcattgaatattagaatatcagggaaaagatcttaaaggtcatcagcttacttcctgcttacctcgctattagttggcagcaaccagatgaggaaacatggagattagaagcttgaatctctaggatgtgtggctcaagaaccacagcgtggccatgtaaagcaagaaatgggactttggaagttagaattgtttagattcttgtatatatgtatgtatttgacattttgctagcagagctgagaaagaactggacattcccccaactttgggggaaaagtgggtgactatatgtagctacattgatgaaacccatgttacaaaatcctctaaaaatgctttaacctaaggaagggtagcaaatgtattatttagatatcttcttatactattaatgtcttatttttttaaatccaaattttaaaaaaatataattaacagggccagttggaggtttcctttttcaaatatccagtgccctaacatctaaaacaatggctctgcgaggacggttttgactccaagggaaatttggcagtgtctagagacatttttggttgtcatagctgaaggaaatggtattggccaaggatgttgctaaataccctacaatgcacaggacatacttctgcaagaaattatccggttcaaaatgtcaatggtaccattgtaaacctaggggctgcacgatttctggtaaggacctagtgtttttgattcctaccaggtgggagaatagtctcagtgggcgatgtttggtgaattagattaacaccttagatcctctagcaactaactctatttctttgcaagaggaggaattgagggaaaaataaaaggaaatctgtttacgacatgacgcagatactgtttcgtatgtttaggttgtcttcaaatctgaaaaaagaacccctttttttctaaaaacagacttaatttactgcaaatttggactactattgttttgaattgttatttttgcatatgtttttgaaattgtaaatagaatatagtcatatcttttttatccagaagtgatttttttttttcctggcagcttcaactaccaagaaaggagaagtaagctaagtgtttaactttatggataacacttatgttatatatgtatgtataacacttatgttatgtatgtatgtatgtatgttgtgaatgtccagaaaaattccaagcttataatgaatctttttttcccctatgagctccactttagactatttaatgtttttaacaagcttaatttgttgatgaaagaaggtaattgacagttgagatcacttttgctatttatcatccataccttatggataagttactcaagttattctttctgagcctcagttttctcatctataaaataggggtagtgataatccatgtattacaaggctattgtaagaattattaaatgaggtaatatgtattaagatgcagtgtcaactataatatactgtagaagagttattcgcttcagaagaatcaaattaggaaggaatatagaggttgtcaaaggcaggaatgtagatagtaaggcggagaatagtgatggctgacagcctctctagggaggagagaagcactaaatacaaatattgataacaaactagtaaaataactagtatatcactataatctgaaactccttaatataggggcaaactgacttccttctgtagcacctgagagtatcaccgttatagcacagtaaaataactgattattataatggtgaaattaacttattaagaaaagattaccttgttttcaaatatgctatttgagaagacttgaaaatatatatattttacttcagagttaaaatttttggaagtgacttattcaaaaagttttagtgtttttaagagtatgctgtcgttatttggattaattcccttttggggaataatccttttgtcttcatttactatgcctgccttcctgtgtatttgaagggtttttctattatctgaaggtaattattcttcagatgtgagaatttaactgaagaaataggggttgtaagcctgctcaccatttgtaaaatctcatttccttctagatttcttttaaaattatttttcatctttctggcgtgtcactacgcccagcaaatttttgtattttaagtggagacagggtttcgccatgttggtcagactggtctcgaactcctgaccttgtgatctacctgcctcggccttccaaagtgttgggattacaggtgtgagccaccgcgcctggctggtttcttaaaattttgttaactggtcacctttctttcagaatcatataaaaataagggtagaggtggtcaaaggcccagctattcagtaagatttttatggggtaatttgagggtggaatagttgcagacaatattcagaataagtaatgtggtattgattggtattatatatgatatatatatatctctctatatgatatatatatctctatatatgtgatatatatcaatatatagatatatatatcaatatatatctatatattgatatatatttatatataaatgctgatatatatcatatgatatatattgatatatatttatatataaatgctgatatatatatcatatatatatatcagcatttacttaataacattatttgatgtatactctatacttaaatcttcccatttgtcccaaaaatctttatagctttttcccccctcaaatgcaggattcattcaaggttaatgcattgcatttggctggtatgtctctttaagtctcccccaatctggactagtcctaccgccttcctctcttctttaggtttatccattgagaagtagagaccatatgtcctggagcatgttccacattctgaattggtctgttcctcatgattagattctagtcagacatttctggtgagaccatcacacagatgatgtgtatttctgctgtattacatcaggaggcacatgatttcaggctatcactatatcggtaatgcaagtttgatcacttggtaaaggtgaactgacagatctctctactgtttaataaataatttatagaggatacttaatagccatgtaaatatcctattccctgacaaccctttaaccagtgattttggtacccattaatgatccttgcttgaatcagtcattatgttggaggattacaaatggtaacttttctttttgcattccttctacttttattaccttctttgactttttcagggcattgaggtcaggttagataaattctgaatataggccacggaatgtagaaatcaggtcattcctaaccttttctggagccaagtaaatggtgaagatggaagacagctaaggaagtagaccaaaaagagaacggaggtttgccaatgaaggggaggtgagaagtagtagctggaggaggcagggaggagggaaagggccttcatttggtgcttgaaattttcttttcttttttttttttttgatgggccgatgaagagattaaagatagaattggggaataactaatagaaaaaggtcccagatgaagcaggaagaggtaagatcaaaaacagctgttgggggattaactctggaaaagagtagacacctatactctatctcagaaagttaagagttgtgtatagatgagaattaggtacatttggatatgaacggaaaaaactacatctggggactttttttttttttttttttttaaacagttactttttgagccttgcgttgttggaagtaggctaggggacttgaggagagtgatgaaaatgttccacatattgtggggaatggagaagagaagtgtttcaagataaataagtgaaagaattgctgagcagcatcagaggctcatctgagattggaactcataaatttgtaatcagcatattttactgttttttctggcagtgttctgcaagcaggagaaaagcaaagacacactgtattgaaggtggatgagggaggagagatgcaagggagatgaagtaatggggatgtaggctaagtaatgaagttagtaaagtagagcagggctaagatagccaaccagtggtgagagatgcaagggtaatgccaaggagtgattaattaaaatactaatttattgtttgtttgaggttatagtaatcataaaccctgtatttacttttcccttaaactaacatttaatatttttatttgtaaactatttactgacttattgcagatgtttcttagctattttgctttattttccctaaaatgaaaattccttgaaagcatcatctttgttacttaataagtatctaatagtttatatatttgagacatatttattcttcagtacctctgaatgagagattttaagattatcttgctaatatttttggctgggacaccaagaagagaataccagtgtctaatatggttcattttgactgacaaaaatttcactagtaatacaatcgtatcagtggcccaaaggagtaagaaagcatccaagctattttttgttgttgttggaatttttacatgctagagacagattttatcttagtatagtttattcatattccaggcctgtgacccttaatcaattttttttttcttttgagatggagtctggctctgttgctaagctggagtgcagtggtataatcacggctcactgcaacctccccgttctgtgttcaagcgattgctctgcctcagcctcccgagtagctgggactacaggcgtgcaccaccatgcccggctaactttttgtattttagtagagacagggttttaccatgttggccatgatggtctggatatcctgtccttgtgacctgcctgcctcagcctcccaaagtgctgggattacaggcatgagccaccgtgcccggcctccccttaattttaatggctgctataatgttataattctctgagtgctggggaaaaaaagacattgcttttatttggaataatatctagacttaaaaagtatatattttatgaggatatttatgatttttcttcctgataaagatatcacatgaaatagcatttgttttataagccatttaaaaatatttaaatttaacattacaaattgttataatttttatcctcctagtcaatattatttcttattgtttcttgtcactaaataaaaagtaaataagcaactttaggaagcgcatgcattcagagtttcctgcaaagcacagggtttcataaatgccatatgaggatgtaaagaaaaagaaaattagattactacaactttgttcttattttctgggttccttaagcctcttccatacttctttaatgctcaagaggactatagaagtacttatttatatgacagccccaatgttagtatttcttgagattatgtttaaattgtaccttcaatattgagatttttgtgagcaataatatgtgatacgcattttaaaaaaatttaaagatttttaaaaattatgattaaactagattttgtcaaatgataaatagtgtagaagtatattgctatttgtgtataggtagtatgaaaaacttacatttgccagaaattggcttttacatttcaaaaatgttgtggaaagtacttcttagaacatgagatatttgatgtattttgtaggcaaacagcaagaaaccaactgaaggatgagattaaataggaacaagaaaaggtggtggagaaaggagggggcagagtttttactatggtaacataaactcctgagttctgtcaaactgatctttggtaggacattacagtgtggttaagtttttcttgcatattatcagtacttgtaaatttggagaaatgaaatttgagatttttttgtttgcttttaaaaaaacagcagtcagttgtggacttttaaaaaaattaggtccaaaattgtatcaaaattatgtcaaaaaagctctgtccagctccagtgttaaaaagaaattccactttatccatgttttctcaaattataaatagactttttttaaaaaagttcatttataagtcaattatatggggccaggcgcggtggctcacgcctgtaatgccagcactttgggaggccgaggtgggcgaatcacctgaggtcgggagtttgagaccagtctggccaacatggtgaaacttcgtctctactgaaaatacgaaaattaggcaggcaaggtgacaggcgtttgtagtcccattttcttgggaggctgaggtaggagaatcagttgaatccagaagcaggaagttgcagtgagccgagatcacgccactgcactccagcctgagtgacagagcgagactgtctcaaaaaaaaaaaaaagggtcaattatatggaattcagaagttgttgttgttgaaatggcctctctccactgccttggtcagagtgcagtgatgccatcacagctcactgcagcctcaacttcttgggctcaaactttcttgaaagtgctaaaatgatgcgccaaagtagtatatttatcccacgttacaggtgcacaattactcctttggtaagaaaaatgcagtaaattacactgatgaaaatgtaggctgggcatggtggctcacgcctgtaatcccagcactttgggaggctgaggcaggcggatcacctgaggtcaggagtttgagaccagcctgggcaacatggtgaaaccctgtctatactaaaaatacaaagattagccgggtgtggtgctgggtgccagtagtcttagctactcaggaggctgaggcaggagaatcgcttgaacccgggaggcggaggttgttatgaactgagatcttgccactgtactccagtctaggcgacacagcgagactccatctcaaaaaaaaagaaaagaaaatgtatagtatcttttttcttttggaatagtcctggtcttataaaattgtcacaattagatgttaattatttctatcattcaatagaagatgaacataagtaacagttatgagagtaaataattattgattcagtcattgatctgataaggagacaaagacagaagaggaaagcaccaggagcctgaaatgggtgggaaggagtagtgacataatttaaaatttttttattggtgcagagacagaggcatgaaacttagaatcagaaaatctgaattcagattccctcttcacagttaactcactgaatggtctgaaatcaagttactctagaacttgtttcttcattcatataatggagatcgttgattcattgattcattcagaaatatttttcttactaggttattttgaagatgaacaaaaacatctgaaagtaagctattatgaactgtatagtgttcactgtatttgactgtatagtcagatattagtgatgatgcaattcttcttgtctttccatttcattcttccctgtcatccttccttctttcattgatagcgtatttttacatgctcttgatctagcgcttcacagaaccttcagagcctgcagtcccagctgatttccactcctcctcccactcacacattgggcacaggagtagggtgtgaggcaacttttctaggtcagcctgcttattttctcactgttgactgacaaagtcctgtctttctcaaggtgtgacataaacctgaggtgccttttagtccctgggcttgatattctttctttctcactttgcctctccttttcccatcccctctcgccccattcctgtgtgtatgtaactctgaccatctcctttctccaccacttacttgttccttttttttttttttgagacggagtcgcgctctgtcacccaggctggagttcaatggcatgatcttggctcattgcaacctctgcctcccaggtccaagcgattcttgtgcctcaaccttctgagtagctgggattacaggtgcatgccaccatgcccggctaatttttcgtattttttgtagagatggggtttcaccacgttggctaggctgatcttgaactcctgacctcaggtgatctaaccacctcgtcctcccaaagtgctggaattacagacatgagccactgcgcccggcctcttgttcctctttaatctcacccttcaattggcttcttgctgtttgcctacaaatatggtcaggtctccgatagcctaaaagattcttgctcaactcttgttctttttttttttttccttttaccaccaaagagatgttgatattgttgcctttattacttcatcacttacctcttaacctcagtgggattgcttcttccctaaccactgtcctgaaactgttcttaatccagtatcctttctaaagttagtaatctccttgatctctttgcagcatgttgatgctacttactgttcgcactttacttcctgacacatcttccctgtgtaaggatggtatttctgattgcctttgtcttttcctctaaacatatttgccctaccccttcttcagagctttcattagctctcttcttcggcactttctccatttgtaatatcactttcctgtgactatctgtagttatctactaattcattcctgtaatgtaattgaactagaagcagtaatggaaaattcagggaagcaggattctgttcactacaagaatattttttctccaaagtaattatggttgttttacagtagtactctgcttttaaagtagttaattcttcattattgaagttttcaagtagaggcaaaaagacaccttgtagaaaggatttatatatgaagtagaaagtcaagccagatattcttttaaagtcttgtccaactcaaaaattgtaatttttatctcgtctactctacttccatggacttaactttgacctatgctcagatgtcttccaaaccattatttccagtcactcccctaccacctcctcgtctgtcttctctcccacgggcacaattttgtcatcaaagttgcttatgttctaggccaccatattttctagcttcattatcactttccaatattctttttaccccctttagtggcaaggcaatgaggatcatttttctatgctttggtgacttttctgaaagtaagttatgtctgcccatattggtttagtttgttattgctgttttccctctactttctcctacccaccacctctctctccaggattaggaatgctcaagcaaagaaaaggacgccagaagaggaggctcaggatcctaaagtttgcatttattttaaaattttgcatggcacagttgaaatgttaatgtttgctgaccatttaaaaagtaagatgtttgccgggcgtggtggctcacgcctgtaatcccagcactttgggaggccaaggcgggtggatcacctgaggtcaggagttcaagactagcctgaccaatatggcgaaaccctgtctctactaaaattacagaaattagctgggcgtggtggcatgcgcctgtagtcccagatactcaggaggctgaggcaggagaatggcttgaaactgggaggcggaggttgcagtgaagccgcgattgcaccactgcactctagcctgctgacagtgagactgtctcaaaaaaaaaaagtttataataatagttgttgcaattatttattgaatgtctactatgtaccaagtattatgctatgaactcacataagttatttcatttaaatcttatgacattcctatgaggaagatactgctgctgtcccattttacaaattaggaaacagacttaggaaggtaagacagttgtcacacaactaataaatgacagtgatctaactgattgtatggccaatactcttaactagtatatcgttttacaaggaaggtggagatctagaatcaaatttcagaaagtcaagtaatgttaatacaaacaaggaaatatattttggatttatatttttagattatttgaaatgtatgtgaaccttttgaggtattgtgttagtggcttgtgtgtcttacacactttctgtgatattcattcatttgctcattcgttcattgaatagtcatgcagtttattgaatgcttagactttgtattgggtgtggtataggaaagtgaatgaaacaaatataagtaagtaagtttacagtatagtgggagagataggaaacaagcaggtaaataatcacataatttattttagtctagagtagtttcccacctttttaaaatgactgagtatccaagccattttcttaatagactatctcatactcttaatttgtctcattgtttcctcatatatggtggtttaaaccttactatcctacttccttctatttactgtaaactcaaaggtaggtctagagcaagggtgctgaaccttgagttcacagactcttgtagggtctgtagaattcagggaatctgtgaactttagatggggaaaaaattacatctttattttaacttattccctaactcagtggttctcaaccggggtgagtttgtcttctccttccccaaccctaggacatttttgattgtcacagctgggtgggtacaagatagtccctgataacagaattatccctttcaaaatgtcagtagtgtcaaagttgaaaaactctgccctaactggattttagcatttcctttaattaggaatataagaaacgcttcatggatacagtatggacagtacatttacagtacctgtagctttgtcaccaatagaaatctcaggtattctcatatcacattcaattgctacagatatcttaagatttaatttatgctcatttattgcctataaggtagttactagattcgtattaagaagcaatagtaggctgggcgcggtggctcacgcctgtaatcccagcactttgggaggccgaggcgggcggatcacaaggtcaggagatcgagaccatcttggctaacacggtgaaaccccgtctctactaaaaatacaaaaaattagccgggcgcggtggcgggcacctgtagtcccagctactcgggaggctgaggcaggagaatggcgtgaacctgggaggcggagcttgcagtgagccgagattgtgccactgcaatctggcctgggctaaagagcgggactccgtctcaaaaaaaaaaaaaaaaaaaaaaaaaaaaaaaagaagcaatagtagactgggcatggtagctcatgcctgtaataccagcactctgggaggctgatgtgggaggactgcctgagcccaggagttcaggaccagcctggacaacatagtgagacctcgtctctacaaaaatacaaaaattagccaggtgtggtagtgtgcacctgtggtcccagctactcaggaggctgaggtgggaggatcgcttgcacccaggaggttgagattgcagtgagctgtgattatgtcactgcactccagcctgggtgacagtgagagcctgtctcaaaaagaagaaataatactatgttataatttaaacagttattattgtagctgtagttcagtataattgtccattgtagtgttgtgtgttttatgcatttaaaaacattattctaagaaggtatccataaacttcgccagactgtaaaagaaatccacaggacaataaagcttaactcctgatctagagattggattggattggattggattaaacatttttgaagagactatttcataggtaatgatgtttatttcctattttgtcatttcatgaattacataatatcaggttgtcctcctgttatcagtaatgttaactttaatgacttatgtaaggtggtgacagccaggtctccattttaaagatacattttcccctttgtgttgctaagtaatctgtgaggtaatacttaggcgccatgagaatataatgtttttaacaacttttcacctaatggccttagcatactttggtgatttttgcctgaattagcttttacattgggggttgcaaattggtgattttctaatttggttattccttttatatttattactggcattcttcagtagagattttctttccccaccccctttccttatctttttttttctcccttaagtatctctatgtatccattaatttttacttattccatatgttatactctattacttttaaaaaaatatgctcaagttgtcccaaatgtggccagtgggaacccccttttaacttggtcctttgtcctcttgataggtcctgctggtctttgagcatatcttgctttctgacacaagagtgctcagggtagacttattctttctgtattccatgtctggagttacatattctttcaaagagtcctggttcttttagttggaagtggtatttagaaacagaagtctgggcaccacgtgtgttcattgcttggtggggttctggctggtggttggggttgggggaggcaatgcttctagtgcctttcaaaagaagtttttaactgaacataaaaagatattttgagctataagaaagaaaatcaaatctctatttactcatccttggaaatcctttttttttggaatggatgattgttttttcttttccttattagcccagacccattctgttattacttaagtattattggcagctgtctgtctgttttgtctgtctgttctgatatgttctacataccatccatttcattcatctataaaatttttattatatgtatgacaggaactgtgataagcaaatagaatacacagaaaaacagaaacatcaagaaatgcaaagcctgatagggaagaactgtatgaaaagcaaaacctcagtatgattgatgcaaaaattgaaatacatagagtgactaagtgtgagaaaccaaagaaagcttcaagagagaataatatttgaacatagtattcatacaattataaggagattaccatgtgaaaaaggtagagctatttatagattctcattacaattgttaaaatgccaaatttgtttctagatggtagttaacttgaactatcagaaatcagtagttccctgtgtttagtgcttagagctttccgttttcctgtattttgtgtattttgtttgcttgtttgttttttcgaactgattttttttctgagtagacaaactatcattgcttatcctgaaaccttcttaaggtttctcatcatttttgttctttagcctttcaatgaaagattatttctttgctgaaattttgtgattcagatgccatgtacatttgttgtatttgtctgtacatctacatcttatgaataaatccatgttttcttaccagtgattgtacttttataattatgtgatgatcagtacaaagtttggttcttactgtagggagatctttttaataataagctgtggatggtgaaggcagtgaagagtcaaatgtttggaaactgggactcatctttataggcagtccactagttttatgtaatccccttttactagagatcttccctcttgttataagaattaagagtggtataggaaaaaagagaatgtgcatatgttttccaagtcaaaatctttaaagagtaaaccatgtgtttttctcctcagatacagaaataacttagaagaatctagaaatatttttctgccatctccctgcatatttctaggtttctaaaatggcacttaggattttttttctgtaaaaacagcatggtaaatagaataaatcaagatatcaacatagtattgtcagaatgaatatctaatttatctgacattaagcaatggatgtttaacataaatacattttccacatgtctgtggcttaacacttcatgtcaaaatgtatttattttagatttgggggtacagagcaagatggtggactagaaggctccactggatgtccccctccataggaacaccaaatttaacaactacacaccaaaagcactttcataagaaacaaaaatcaggtgagcactcacagaacctgattttaacttcatattgcccaaagaagcactgaacaggataggaaagacagtcttgaattgctgacaccacctctcccccatcccccatgcagcgactatgtggtgtggagaaatttgtatgcttgggataggaggagtgcagcaattgtgagacttctcattgaatgcactataacagcaaaaagcaaaaccagggtgaactcagctgatgcccacacatggagggagcattcagaccagccctagccagaggggaattacccatcacagtggttggaacttgagttctggcaagccttgccactgtgggctgaggtgtgccggggtcctaaataaaaggcagtgtaagccaaaaggactgcaagtcctagtgctgaactgggctcggcaccagtggaattaggggcacatgacttactaagacatcaattggaacacctaagggagtgcttgtgccaccccttctccaagcccaggcagcccagctcacagctctaaaagatatccctaccttctgcttggggagaggagaaggaagagtaaagaggacttttgtcttacatcttggatatcagctcaaccacagtaggatagggtactggtcaggcccccattctaagccctagctcctggataacatttctagacacacgcctgggctagaagggaacctgttgccttgaagggagggacccagtcctggcaggatccatcctgtgctgactaaagggcccttgggccctgaataactagcagtgataaccacgtagtacgccatgggccttggctgagactcagacatgctggcttcaggtgagacccagcacattcccagctgtagtggctacagtgagagactctgcttgagaaaagcagatggaaaaataaaggggactttgtcttgtatcttaggtatcaccttggccatagtgggttcaaacaccgagtgggctcttggggtccctgattccaggccttggctcttggacagcatttctggacctgccctggaccagaggggagcttactgaagggtgagtcccaggcctggcagccttcaccacaagctgactgaagagcccttgtatcttgtgaacattgacagtagcctggcagtactccctatgggcctttggtggtggtggccacagggtgaggctcctctgcctgtggaaaggggagagagaagtgggaatgaccgtgtctcatgatttgagggccagctcagctgcagtataatagaacaccaggtagacttctaaggtttttgactgattcctagctcctggagataacttctggacttacatgaggacttgggggcacttgctgtcttgaagagaaggacagaagctgggctggctttgccacctgccgatggtagagccctaggtccttgaacaaacataggcggtagccaggtagtggttacggtgggccttgggtgagactcagtgctgtgctggcttcaggtctgacccagtgcagtgccagtgttgaccacagggtgcttgtgttgccctgctgcaagccccatgcagctcagcagaaagagacttcatttgtttgggagaaagtaagggaagagaacaagaatctctgcttggtaatccagagaattcttccagattttattcaagactaccaaggtggtacctctacaagtctgcaagaaccacagcattactgggcttggggtgccccctaaagcagatacagcttaaatcacaacacccaaatccattagagtatctggaaagccttcccaggaaggacaggtacagataagtccagacagtgaagactacaataaataacttcaatgtccagacactgaagaacatctacacccatctacatcatccaggaaaatatgacctctccagatgaactaaataaggcaccagggactaattctggagaaacagagttatgtgacctttcaaacagaaatcaaaacagctgtgttgagaaaactcagagaaattcaagataacacagagatggaattcagaatcctatcagataaatttaacagattgaaataattaaaaataattaaacagatattctggagttgaaaaatgcaattgacatactgaagaatgcatcataatggcttaaaagcagttgatcggccgggtgtggtggcttatgtctgtaatcccatcagtttgggaggctgaggagggtggatcatgaggtcaggagttcgagaccagcccggccaacatggtgaaaccctgcctctactaaagatacaaaaaattagccgggcaaggtggcacatccctgtaatctgagccacttaggaggctgaggcaggagaattgcttgaacctgggaggcagaggttgcagtgagacgagatcgtgccattgcactctagtctgggtgacagggcgagactccatctcaaaacaaaaaacggcagttgatcaagcagaagaaagagttagtgagcttgaagacaggctttttgaaaatacacaatcagagaagacaaaagaaaaaagaataaaaataagcacacctacgggatttagaaagtagccttgaaggggcaaatctaagagttattgtctgtaaagaggaggtagagaaagagataggggtaaaaagtttattcgaaggaataataacagagaacttctcaaacctagagaaagatattaatatccaagtacaagaaggttataggacactaagcaaatttcacccagagaggactaactcgagacatttaataataaaattcccaaagacaaggataaagcaaggatactaaaaggagcaagagaaaagaaacaacatacaatggagctccaatatggctggcagtagacttttcagtagaaaccttacaggccaagagagtggcatgacatgtttcaaatgccgaaggaaaaaaccttttaccttagaatactatatccaatgaaaatatccttcaaacatgaaagagaaataaagactttcccagacaaacaaaagccaagggatttcatcagctccagacctgtcctacaagaaatgctaaagagctggccaggtgcagtggctcacaccggtaatcctggcactttgggaggctgaggtgggtggatcagctgaggtcaggagttgaagactagcctggctaacatgatgaaaccttgtctctactgaaaaacaaaaattagccaggcatgatagatagtccatgcctgtaatcccagctactcaggaggctgaggcaggagaatcacttgaacctgggaggtggaggttgcagtgagccaagatggtgccaccgcactccagcctgggtgacagagtgagactctgtcttaaaaaaagctaaagggtatgtacttcaataaaaaagaaaaagattaataagcaaaaagataccatctgaagatgtaaaactaactggcaatataagtacacagaaaatcatagaatattataacatgataactggtgtgtaaactagccttaattagagaaattaaaaggggccaataaaaaattataactataattttttcaagacataaggatagtaaaatataaatagaaacaacaaaaagctataaagtggggggacatagttaaagtgcagagttttattagttttctttttgcctatttatacaagcagtgttaattgttatctgcataaaacagtgggttataagatagtatttgcaagcctcatggtaacctcaaatcaaaaaacatggaacagatacacaaaaaattaagaaaccaagacattaagtcataacaccagaaaaaaatcacctttactaagaggaagacaggaaggaagagaagactacgaaacaaccagaaaacaaaaaacaaatggcaggagtaagtcgttacttatcagtaataatattgaatgtaagttgactaactctccaatcacaagacataaagaggctgcatggatagaaaaacaggacccagtgatctgttgcccacaagaaacacacttcacctataaagacacacacagacaaaaaaagggatggaaaaagatattctctagtagttatcagacaaaatagatttcaagacacaaactataagaagagacaatgaaggtcaccatataatgataaaggggtcaattcagcataggatataacaattgtaaatatatatgcacctaactattggagcactcatatataaagcaaatattagagccaaagaaacaggttggaaataaagaagacaattcaaataatatcaagcatcttctctgaccacaatggaataaaaccagaaatcaatattaggaattctggaaaccatacaaacacatggaaattacataatatgttcctgaatgaccagtgagtcaatgaagaaattaagaaattgaaaaatttattaataatggaaacatgacataccaaaatctatgaggatacagcaaaaatgatacaaagaggaaagtttatagctataagtgcctacatcaaaaagaagaaaaactttaaataaaaacctaatgatggattttaaagaaagggaaaagcaagagcaagccaaacaaaattagtggaaaaaaagaaataacaaagctcagagcagagataaatgaaattgaaatgaagaaacaggacaaaagatcaataaaacgttgggtttttgaaaagataaaacaaaacaaaacaaaacaaaaactgacacatcttttgccagactaagaaaaaagaagaccccaaaagatcagagatgaaaaaaggagatgctaaaaccgataccacaaaattcagaggattattagcggctactgtgagcaactgtatgccaataaattgcaaaatctagaagaaatggataaattcctatatacgtacaatcttccaggactgaaccatgaagaaacccagggtgtgaacagaccaataacaagtaataagataaaagttgtgatgaaaagtctcccagtaaaaagtccagaacctgaatggcttcactgctgaattctaccaaacatttaatgagggtctagtaccaatcctactcaaactagtctgaaaaataggaggagggaatactttaaaactcattctacgagggcagtattaccctgataccaaaaccaaacaaagacgcatcagaaaacgaaactgcaggcctatgtctaacgggggaaccagccccctgtatttcaacataggttctcttctattttccctaagtgtcggccagtctgagaaataaagggaaatagtacaaaagagagaaattttaaagctgagtgtctgggtgagacatcacatgtcagcaggttccgtgatgcccccgagccataaaaccagcaagtttttattagcaattttcaaaggggagggagtgtatgaatagggtgtgggtcacagagatcacatgcttcaagggcaacaaaatatcacaaggcaaatgggcagggcaaggtcaccaggccagggcaaaactagaattactaatgaggttactaggcaggaatttcctaatcctaataagcctgggggtgctgcaggagactagggtgtgtttcatccctatctacaactgcataaggcagacactcccagagcggccattttagaggcccccctccccggccgggaatgcattcttttcccagggctgttaattattaatattccttactggggaaagaactcagcaatatttctcttactcgtttttggcaataagagaaatatggctctgtcctgcgtggcttccaggcagtcagacctaatggttatctcccttgttccctgaacatcgctgttatcctgttcttttttcaaggtgcccagatttcatattgttcgaacacacatgctttgggaacaatttgtgcagttaacgcaatcatcacagggtcctgaggtgacatacatcctcagcttataaggatgatgggattaagagattaaagtaaagacaggcataggaaattataagagtattgattggggaagtgataaatgtccatgaaatgttcacaatttatgttcagagactgcagtaaagacaggcataagaaattataaaagtattaatttggagcactaacaaattgtccatgaaatcttcacaatttatgttcttctgccatggcttcagccggtccctccgttcagggtccctgacttcctgcaacatctctccctttctttttatataaatgtgccatggtgatgaaggcttgttctctcgattttgacgcaggattctttgactggtccagcacactaaagacaagccgattaaacagggaaacataattccgaaatttactacagtggagcccccaatagacttaatccaagttgtggggtttagtccagaaagattttctgccacctgatctaacgcctcagctccaggcacaatggataaatgagcttgagagacttcaaaaatttgtttatttaatttagtcatgtccaatgataaattatcttccctacccagaaggtgtcctttgaccatttcccatgaatgatcagtctcgttataggaatacagggtgatacggaaatctgaagtattccagtcgcactgcatttgcatgtgatgttcgagactcactacccgatctccaagccaaataacagactgtcttaaatcattaatttgattagccaatttttggtcaatgccttgttgagaattcaacatttggtggaattggcttgccagtcattaacaaaatgagctgtttgaatagactgatgtaacgccattccggcagtggtggccattgcagtgactgtaattaggcccatgatcacagcaattaaagtgaaaacaaatctcttagatctttaaagaattcgctgtaacacttcattaattaaatgtattgagggggaggattcccaaggtctgggcaaagttaccggaatccagatttcttctccagctcgaaccaacattatacttttcctggagtcaaaatgggagttaatacaagtgtataaatgacaatgcattggacagtttgattcttcgtccaaattttgatatttcccactaatggcatgtaaggaggcttaacacaactctttgtggaaacaggttggaggtaagtaaaacagaatgtctggatctacgttgatagtgagagagggggacggtagcagggacaacagacaaaatagtttccccttcccatacttgcagtccagacatggcaatagccaatttctaaagttgtgggtgttctggactcagaatggggaatatcatacgaggcctcagatgggggtaatgcctttatcttcccattttaaggaaaagaatgagctgaacctcctatgcaaagtagaatgatgattctcgttctcccaataagaaataaaataagtagcctccaggcattcccttccaccagaagagcacttgttttttaaatagccctttggtgcccagtctattactaaaccatatgagtcatttataaacattactgcatgtgagttaacacaatcttcccaaattaaggttttagatgggccctcaaaatttttagggcatggttttcctgcaggtttatattgaaagtatgggatatctcccattactccccctttcatttgtcttaaaggagaaagggagaggctggagaccaaatgtcctggtttctctgtagctgatctctctggaagataagcagcccagacttgagtttctagatggatacaaccaggtgcatgtccgaggcacagaggtgggtgtttgtaacccatggtaacattaaatgcagtgccgccttttcctgattgagcggggcaacggtcatctgtagctccaggcatccacacactatcattagtgtagatttctgcaggagcgtccatccaggtgagtggtcgaataagtggaggaaaaggcacataagcccaataagaataattttgtgtagccggtaaatcagtgtgaaaggaaactggtgagacagaaagtataaggaggggaatcattaaataaaacctagtgtaagcgagattcagtgccgaaagaggaagagaagaacagagggatgttattttcaggctaatataaatggtgagatttttaggtttgtaaggagaaaaagaaaggtaattaggagaagtgggattggttagatgggtctgtgttgccatcagggaggattgaatgagacccattgtgatttggtgggccagcttctaaggagttggcacagatctcaccacatctgagggcggtttttgacgcggacgtcttttccctgtggttttcctttgatgatctcctggtgacacacaagcatattctctttcccacgttaactagaatcagagacaatatttaaaggttttggggaaatcctataaggcagtaattacagcaatttaactctgccttttgagcagaggtataaggggtagaaataagcttgtttgtaggacctacataaccagcatttccattactggagccatcagtgaacactgtaacagcctcaggaatgggctgatctttggtcaatcgagggaccacccaagaagtcatttttataaaatcaaacaatttgttttttggataatgaatgtcaataatgccaataaaatcagtcaagtgaatttgccacagtatggaatgttgaaaggtgacttgaacttcgagccgatttaaaggaactacaattaaattcggatcaaatccggaaattttaagtattctacaccgagtctgtccaattaagatggccagttggtccagataaacagacaaagtttttgacacagaatgaggaagaaaacaccactccgctaaatcattatgttgaactattagcccagtaggggagtgcaatgaggcgaaaaccagaagctgaaaaggctgaaacggctgtactctagataactggatggtctgaattctttacgaattccagttctagtgaagcctcaggggtcaaagtcctgggactgcggagattggaatctccccgcagcatagaaaacaagttagtgcataggtcggaatgcctaaagtaggtgttaaataattaatgttacccaaaagtttttggaagtcatttaaagttttcaaataatctctcctaatttgaactttttgaggttgaatatgtttatcgaccatgattcctaaatattgaacaggagtggtctgttgaattttgtcctgagcgatgtgtaatccagcctctaacacagcagctcaaaatttgataacagtcaattctttatcagtgggggcagcaattaaaatatcaatataatgaagaatataggcctggggaaactgggctcgaactggtgaaagcacttgcccaacataaagctggcagattgtagggctatttagcattccctgaggaagtactttccattgataatgagctgcaggctcttgattattgatagatggtacaataaaagcaaatttttcacaatctgatttatgtaaagcaatataaaaaaatcaataactatgagaggccaatttttaggtattaaagcaggggcaggcatgccgagttggaaggctcctataggtttaattacagcattaatggcccttaaattggttaccatccaccacttgcctgatttcttttttactagaaacacaggagaattccagcgggaaagaaggttccaaatttctaagttgtaactgttcagaaactaattgagttaaagcctccagtttttctttagagagcagccactgctgaatccaaatgggtgtgtcagatttccattgtaaaggaataggatcaggaggcgtggcagtggccgccattaaaaaggataacctaaaccagccctgtcttcttttatagtaattgggaggggtttagtaatcccttcatgttttggacggagacggagtccaggaacataccgcatgttttccatcatatgctgactgggagtactataagagttaggtggaatgttaatttaagccccagtatctactaaaccctcaaacttttttccttgaatgtgtatggaggtaggctgttgttcagaaattacattaatccaataagcggccttttcgctgctggagccccttccagggccacgtgtcttatctcctttgtttaaaacaatattaagtagtaaaagcaattgagcaattgagtcaccggccggaatggaaacaggaagcttggcagacacgattagtttaatctcgtcaactgaatcagaattaatgagaccagtatgaatggtgattcctttagcagaggtggatgccctacctaacaccaggctcaccaaaccttgaggtaaagggccagtgacccctgtggggacaattaaaggcaaagagttaggtagtaaatttagaggaatagtgctacagagatcgaccgccccaacccctaacgtggaggtggacaagcattgtactgagaagaagaggctgggacccatctgggttgactgtaggtaaatttgtttgtggtgggggctgcgttgggactgcctgaagtggaaatgcaatgttggtctgagtctgaagcatcccatttgatattggggcctgggactggtcccacttcccatttccctggttctgtggtagggggtttccatctgtatcatacttagagtggcaagtacttgcccaatgtttaccttgcgacgacgtgagcaaacagtagcagcagcatttggccatgtttgttgagccggcttggccgcttttaagtttttaacagtgcaatttttctgagtatgaccaagttgactgcaattatagcaggctccaagaaaagaattagtggggccagtttgattggtccttcatggcccgtgcccacagaatagctttgtgggtgtctgatccaatgccttcacaagctttaatatatgcagggaacacctcgtgatcaggtaaattttgtcattggatggaatgcatggccattttacactcatggttcacattttcaaaagctaacatatgaaaaagaataccttgagcatgctcatcagacagatttttcaatggcatcttgtaatttagctaaaaaatcagggtataattcatcatgaccttgtttaaccatagtaaaagaaacaggagcttggcctggggcgcataatttatcccaagctctcatacacacctttgttacttgttctgtggtaagagcatcaaagtttaattgggcataagtatcagagaaactatcggagcctgtgagctgagcctgagtaattagaatactattagtccgatttagctgagcctgcagatgggcctcttgtgaccaccagatacgaaattgtaaatgctttaatggggttagaaaagcttttgccaaaaggtcccagtctaaaggaagcaaaatgacctcagtacaaaaagtttgtaataccatttaacataaggagaagtaggaccatactgagtacaagcatccttaaattcttttaaaaagctaagattaagaggtacataacgacacatttgtaccctttggaagataggaggttctagtgtgactgggtaagcccacgtgtctaatccacttgtttctttgttttggcataataagtgttgcattgaagtttcaagagtaggtatctgagacagagttggcatagaagtgataggaaaagcatgtgtagataagggaaactgaggttgagggggtcggaccaggatgagagtgtgagaaaggggcattgagggagcagaaggagcagaggtatcctggtgattactggtgtgcatgtgtgaagaagggtacagagaggcaggctgagtggatggcaaagtgaccggttgaggaatggaaatgacaggagagtgaggggctgaagtggatggggtagggcctgaagaattataggtaaattgtagtttggtcctggagccattaggtgactccggaggtttgaagagagaagaattagcgtatatggtcccgggctgtctgagtcgtggccgcgggagcttataagtactggctcttcgtgaaaagaaacaaggtcagcagggggtaacgttaagccaaagtcaccagagttagacattgaattttcagcatcgttaggtgggggaggagtagctgaagggagaggctgatcagataacgaagtccatgcgggagaggaaagttggagaagaggtggagggtcctcacattcagaaaattgtgttaactgtagggggtcacgggattggtatgtcattaggacgacatgtaccaaggcccaatcaccccaaaaagtgacaggaacacatttccctgccgggaacagctcctggaatgttgcaccaacacgatcccatacttttacatatggttcccttttcaggaaaccaaggacagtatttttccaccgccttgaatagagtgaccatattttccatggttactcggacccttccctgttttaacaggtccacatctaaggttgcttttttaggaaaccaaggacagtattttcccactgccctgaatagagtgaccattttttccatgggcactcaaacccttttctgttttaaccagagtgtaatatagaagagataagcataatttttagactccgtgtgacccgtagttaacctggacaaattcacagactactcaccagttgtcagggagtcgaacaagcatttctgtggaccgaaccgatgacatttctccgcacctaccaaagggaatcgggttcccacgtgcacttaggaaaaaaagaaaaaccatgctgggcaccagatatcgggggaaccagttcccgatatttcaacgtgggttcttttctattttccctaagtgtcagccagtctgagaaataaagggaaagagtacaaaagagagaaattttagagctgggtatctgggggagacatcacatgtcagcaggttccatgatgccccctgagccgaaaatccagcaagtttttattagcaattttcaaagaagagggagtatacgaatagagtgtgggtcacagagatcacgtgcttcaagggcaacaaaatatcacaaggcaaatggacagggcaaggtcacaaggccagagcaaaactagaattactaatgaggttcccggtcccgctgtgcaggcactgtcattgataaacatcaggaaacagggtttgagagaagatagccggtctgactacaatttactaggcaggaatttcctaatcctaataagcctgggggtgctgcaggagactagggcgtgtttcatccctatctacaactgcgtaaggcagacactcccagagcggccattttagaggccccccttcccggccgagaatgcattcttttcccagggctgttaattattaatattccttactggggaaagaactcagcaatatttctcttactcgtttttggcaataagagaaatatggctctgtcctgcctggcttccaggcagtcagacctaatggttatctcccttgttccctgaacatcgctgttatcctgcctgttctttttttcaaggtacccagatttcatattgttcaaacatacatgctttacgaacagtctgtgcagttaacgcaatcatcacagggtcccgaggtgacatacatcctcattttacgaagatgatgggattaagagattaaaataaagacaggcataggaaatcataagattgttgattggggaagtgataaatgtccgtgaaatcttcacgatttatgttcagagattgcagtaaagacaggcgtaagaaattataaaagtattaatttggagaactaacaaatgtccatgaaattttcacaatttatgttcttctgccatggcttcagccagtccctcggttcggggtccctgacttcccgcaacacatatctgtgactattgatgcaaaaaatcttcaataaaaatactagcaaaccaaattcaacaacaattaaaaatattattcatcatgaccaagtgggatttatttcaggaatgtagatagttcaacatgtgcaaaggtgatacatcatatcaagagaatgaaggagaaaaaacatatcaattgattcttaaaaagcatgtcataaaattaaacatcctttcataataaaaaccctcaaaactgggtatagaaggaacattcctcaaaacagtaaaagccatgtatgacagacccatagctgttatcacactgaatgaggaaaaactgaaagcccttcttctaagatctgaaacacagcaaggatgcccactttcactacagttattcaacgtagtattggaagtcctagccggagcagtcagacaggagaaagaaagaaagcatccaaattggaaaggaaggagtcaaattatccttgtttgtagattatatgatcttatgtttggataaacctaaagaattcatcaaaaaatgattagaagtgatagattcagtaaagttgcaggatacaaaatcagcatacaaaaatcagtatcatttacatatgccaacactgaacaatgtgaaaaagaaatcaagaaagtaacaacagctagatttacaacagctagaaataaaatacctgggagttaaccaaaaaagtgaaaagtctctacagtgaaagctataaaatgttggttcaagaaattgaaggcaaacacacacacaaaggaaagatattctgtgttcatggattggaagaatcaatattgttaaaatgtccatactaaccaaagcaatctacagattcagtgtattccctatcaaaataccaattaaattcttcagagaaatagaaaaaacaatcttgaaatttatatagaaccacaaaagacttggaataaacaaagctatcctatgcaaaaaaaagaaaattggaagaaccgcatgatgtgatttcaaattatacaacgtattggcatataaccagacacatagaacagtggaaccaagtagagaacccagaaataaatccattcatctacagtgatctcattcttaacaaaggacaatcttggggaaaaggacagtctcttcaataaattgtgctgggaaaactagatatccatggatagaacaatgaaactggaccctatttcgccatatacaaaaataaaatggatgcaagacttaaatctaagacttcaaactatgaaacaacgaaaagaaagccttggggaaaatgtccaggtcattgaagtgagcaaggatttcttgaataaataccccacaagcacaggcaaccaaagcaaaaatgaacaaatggaatcacatcaagttacaaagcttctgcacagcaaaggaaacaacaaagtgaggagacatcccacagaatgggaggaaaatatttgcaaactacccatctgacaagggattaataacaagaatatatagggagctcaaacaaccttatagataaaaatccaatatgttgattaaaagatgggcaaaatatctgaatagatattactcaagagaaaacatgcaaatggcacatgggtgtatttatcatcagaggaatgcaaatcagaagtacaatgagctatctcaccccagttaaaatggcatttatccaaaagacaggcattaagaagtgcttgcgaagatgtggagaatagggaaccctcatacggttagtggtaatgtaaattagtacaatcaccgtggagagcagtttggaggtccctcgaaaaactgaaaacggagctgtatgatccagcattcccactcctaagaatatacaataaatgaaatcagtatattgaagagatatccatatttattgcagcagtattcacaatagcctcgatttggaacagctgaaatgtccatcaacagacgaatgagtaaagaaaatgtggtacatatacacaatagagaactattcagccatagaaaaggatgagatcttgtcatttgcaacagatggatggaagtggaggtcactatgtaagccaggcacagaatgagaaacttcacatgttctcccttatttgtgggagctaaaaatgaaaataattgaaactcgagtgatggttaccagaggcctggaaggataagtgtgggggaagggggcctggaggagaaggtagtggtggttaataggtacagaaaaatagaaagaatgaataagacctagtatttgcttgcctaacagggtgattagagtaaaaagtcatttttattgtacattttaaaataactaaaagtataatttgatagtaacacaaaggataaatacctactgtgtactcacaaaaattgaaaaagtttcaaaaatgttttttgctgttttatttgattaatgagaaagttaacatggtcaatcttaaatgtagaattgtctttatcacttagtacagtgtttctgtgttgtacagtgtttcttaccctttagataagtatgtgtattatcctttagataaagatacatgtttatctctcttaaatatgtgtaaacttttatacagaaacaaccatacacttaatgtgtgtggatataaatgacagaggcctttcaaagactcttaattttcccaaaatagcattttcatcacagaacttttgccaccaaacctctgatgtctccttattgcatagagaaccaactacaatttaactatactgtgtgtgtgtgtgtgtgtgtgtgtgtgtgtgtgtgtgtataatttgtcacttcttcccagtgtaaacatttcacttaggtcagtttccactatagtcagttccttagtcttatgattgattattcagtgttcattatcttttgttcatgttattgtaggctttctgtttaagcaccttgaggaagttgtttatctttgtgtatttttaaagcagcttgtttcttactgtttcagtgaatggtatatttggttatgtttcctttgctttgaaagtactgagacagatacatatttttagttttccagcaaactagagggaagttagaacagatgaactatttgtcatgggttcttgcctcatatctctgctccttattttttatttattgtttgtttgtttgagacggggtctcaccatgttgcccaggctggagtatagtggcgtgatcttggctcactgcaacctctgcctcctaggctcaagcaatcctctcacctcagccttctgagtaactggactacaggcatgcaccaccacgcccagctaatttttgtaatttttatagatacgaggtttcatcatgtcgttcaggctggccttgaactccaggactcaagtaatccgcctgctttggcctcccaaagtgctgagatttacaagcatgagccactgtgccagcctctgctccccatttcctactcttatttatctttttgccagattttctaacttggctttttgttttgttttgtttttttagacttgttaaacctcatattctttctgggcctttctattcttctctgttttgagagaacttagactaggtgatctctaaacatttcagtagtaaaacaatgcatgttctttagtgtccagtttcaatattgcttcatttataaagtcttacctgaccctgtagcctgtattatgttgtcttgctccacaaattatttcagtatttactttaaaatgtagacataggttaacttgtgttttgcttacatatatttgttttaattacttaatacagttgcaagctctttgaagaatgacacttcctttttaaagaatttaattactatttattttttaatcattatattactatgtagcagtcacatcatagtaataattacaatgacagtaacctctgaatactaactctgaggcagacattattttaaatgctttacttattatgtccattctcataattggtaacaggatgttgatgagataagatctcgtttcatctccatttcactgatgaggaaagacagatacataaaggttaagtaaatttcctcaccactagtgagtaaacatagatggacctaagcagggatacttcaaaacccatgcacttatctgttttgctataatgcataactactgtgtacttgctgaatgaatagagtgtttttaatctttaatatatgttgggtacaaccttggtattttttgtactttgaataaaatattaagggtgtttcacttttttaaaaatggggacaaataactatcttagtaaactaaatattgtgatcaattttcccaattaagagcaaatattcaaattgcctactttgaggtattttgaaaaattcttttgcttttgaaagaaaatttgtgacatgtataatacttggattttgatttgcggtgtcttaattagtatttcttactcattttcagttgagtggtgattttatgcaatggcttcaagccacagttcttcaccagtgcctcaaggaagcagcagtgatgttttctttaaaatagaggtagatccgtcaaaacacattcgacctgtgccatcactgccagatgtgtgtcccaaggaacccacaggtaatgctttttttttttgtaggatttttactgatgatttctattatctttaaatgagtagtcaggttttatataccaacgttagaagagtaaattttatgatgttaaaaatcatttgggggggccgggcacggtggctcacgcctgtaatcccagcactttgggaggctgaggtgggcggttcacgaggtcaggagatcgagatcatcctggctaacatggtgaaaccctgtctctactaaaactacaaaaaattagccgggtgtggtggcaggcgcctgtagtctcagctactctggaggctgaggcaggagaatgctgtgaactcaggaggtggagcatgcagtgagctgagatcgggccactgcactccagcctgggtgacagacagactccatctcaaaaaaaaaaaaaaaaaatcatttggggcccggcgtggtggctcacgcctgtaatcccagcactttgggaggccaaggcaggcagatcacttgaggtcaggagggagttcaacatcagcctggccaacatggtgaaaccccatctctaccaaaaatataaaaaattagctgggtgtggtggcgtgtgcctgtaatcccagctgcttgggaggctgaggcaggagaatcacttgaacctgggaggtggaggttgcagtgcactccagcctgggtgacagaacgagactgtttctcaaaaaaaaaaaaaaatcatttggaaatgattgggaaattgaaatttttttttaatgtatttcatgcattacttatataaactgaaaaagtgttgaaaatgaaggtacagattgaaagctgcttagttaaaacatggtacagtcagccctcatcatttgcatattgtgtatttgcaaattctcctgactccttaatatttattcataatccccaaatcactacttgcggcacatttgtggtaatttgcagtcatgtgcagagcagtgaaagatttgagatacctgacacatgcattcccagctgaagttgaacaagacaaagctctgcctttttgtttcagctctcatactataaactaatgttctttttgtggtctgtttttacttggtgccacatgtttggagctttttgttggtgattttgctgtttaaattgcccctaagcgcagtgctaaaatgctatctggagttcctaagtgcaagaaggctatgatgtcccttatggagaaaatacatgtgttgtgtaagcttcattcaggcataaattatagtactgttagccacaagttcggtgttagtgaatcaatgatgtatactgaataaggcgtctttaaacacacaaaacaaggttatgtattgatcagttgatgaaactattgtgaccaaaggctcgcaggaacctaactctttagtttccctacaagcagtggttcaatatttgctaattcaatattcacaataactttatagaacaaatacactactaataatgagaatagagtaaaattttccttcttgtatggttaatgccacagcaacatttatgtcacctaattataagccaaaggatattttatctaggagatcctgccatgatataatagaaaagaggcctacctctaaaaaacagtggggtattaaaggatagaaaatacataatagaaagcagcatagttctgatgttgaaaaaaaaagatagagtaattgtacattaaggaaaggagttcatgaaagactttctttactattcactccaccctgcaatcgtagttctcaaattttgcatatcttttatctcgtgcatatttttcaaagccttagtaattgatgctgccagctgaaggttattcaatcagattgatttttattaaatcatttactgtggaagattagttggtttgcgtaagatggaatctgtgcatttttagttttctagtgtgtactttcaaacatagaaccaattttacagcatttacagagttctcttgtttactttttgcaggtgattcacatagtttatatgttgccccatctctagttacagatcaacatagatggactgtatatcattccaaagtaaatctcccagcagcattaaacgatcctagattagcaaaaagagaatctgacttcttcacaaaaacatggggattggactttgtggacactgaagtcataccttcattctacctcccacagatcagcaaggaacattttacagtatatcaacaggaaatctctcaggtaatatctaatcttggctagttacagtcaggtcaaaagtaatagaaatatttttagtatgctttattatagatttttgaccagtaatgtttgatgaacctatagtattcttttcgttcatacaaattgtactgtcctgggttgcatttaattctttgcttaaatatattttaatacatttctcttacagtagtgatttttcagaattacacattccaaataatgctaagattcaacatgaaacctaccctgcttaccaaggagaaaatgattctgttaggcctataaagtccagatgatttgtgaggtttgagaaattggcagaatattactgtttctgtgtctgattcactgcatacaattctatagagcaccctagctctagcagatagttataatatctccagacataattataacttaatatattactttaaaccctgtctgagagcaagaactgagtatagtgcagagttttagatggtctatcaattcatcttcagattattagtaagtggctgttatcaatacaattaaaatcattaaagtggtacaggggatatttatatttttataaccattcctttttatacttttttcattagcaagcctaatttgaatttagctggttttattttacttactttgcacttttttgaatatggctgtattaacattaatactatatagcatctggttcatttttattcctatcaaatatttttatacagaacctatatattttatttgcctttgtgtgtatatattgccatattaacaatcacttagatctgatcattgaaaacaacacaaaaactgttttcaatgatcagatctaagtgattaagtagatgaacattaatatgcctttgtaacctataatttggtttttctatttgtatattgatcaaatatttattgagtgccttccatgtgtcaggtagtcttctaaacatgaggatacagcagagaacaaaactgacatccattccttcccttacaaagctatgtttttagcaaggggtttaacaataaaccctaaagcaaccactaaaatagcaaaacaaagaattacagctaataatggaagacagaaatggaattttaaaaattctcaatccaaacaaagccataaatagaaaaaaaagaatggataggacataaaataaatttcaagatgataatcttaaacctaatcatatcagtaattacaccaaatctaaatggtttaagcatcccaattaaaaggcagagattgtgagatctgatgacccaagtatatgctgtatataagaaacataccttgaatagaaagaaaaaagcatttgaaaggaggaaaaaatatataccatgcttaacagtagtcagaagaaagcagaaatggctgtattaataacaaagtagatttcagagcaaaaactattagtatgtataaataatgttattttataatgataaaagggtcagctaaccaagaagacattacagttttaagcatttttgcccctaatagcatgcttcaaaacatgtgaagcagaagctgagaattttatggcaaagtagctattcataattacggagatttcaatactctttcaataaataataggacaagcagaatatcagcaagattataatagacttgaaccattaaccaacctggcctgacttgaaagagcactccatataacatagaagaatatacttttttttcaagtgttcatgaaacatttatggacatagactatattctaggtttgaaaacaaattttaatacatttagaagactttacctcatacacagtatgctctctgaccacagtataattaaaatagaaattaataatggaaaggttggtggaaaatccacagatatttggaaaccagaactttatgcttctaaataaaatgtgagtcaaagaagaaagaaaaatcagaaagtagtttgaactgaatggaaatgaaaacacaacatatcaggatttgtggggtgatgctcagttagcacttagggagaaatttgtagcactgaatgcatatattattgaaagaagaatgatttcaaatcagtgacctcagcttccacctgaagaagctggaaaaatggctgggtgcagtggctcatgcctgtaatcccagcactttgggaggccaaggtgggtggatcacctgaggtcaggagttcaagaccagcctggccagcatggtgaaaccctgtctctataaaaatacaaaaaaattagccaggcatgatggcaggtgcctgtaatcccagctactcaggaggctgaagtgggagaatagcttgaaactgggtggttgaggttgcagtgagccgagatcgcaccattgcactctagcctgggtgacagagcgagactccgtctccaaaaaaaaaaaaaaacaaacagaaaaaagaaagaataaacatcaaagtcaaaattagagaaacaacagagaaaattagtgaaacaaaaagctgattctttgagaagataaactcgataagcctttggcatactgattaggaaaaaaagagaagataaaagtcaccaataacaagaataagaaaggtgatatcactacagattctacagagattaaaagcctaataatgaaattttatgaataactttgtgccagtaaattcaacaacttagatgaatttacagatttcttgaatgacacaaaataccaaatctctttcgagaaaaaatagataatctggctgggcatggtggctcacgcttgtaatccccacactttgggaggccatggtgggcagatcacctgaggtcaagagttcgagaccagcctggccaacatggtgaaactccgtctctactaaaaatacaaaaattagccgggtgtggtggtgcgcgcctgtagtcccagctactcaggaggctgaggcagaaggatcccatgaacctgggaggtggaggtttcagtgagctgagatcatgccattccactccagcctgggtgacagcaagactccatctcaaaaaacaaaacaaaaagaaatagaaaaatctgaaatagctttatatttattacactgatgtatagttaaatacctttccacaaagaaagctcagatccacatggcttcactggtgaattctaccaaacatttacagaaaaagtaattccaaatctacacacattctttcaaattttggtaaagatgtagaagacaggtctggttctaggataaggtgaggcaggtgagcaaaatttgagaggcactgaaatctgagagtgggtacctccttaaatattgtaccgtatgcttcttgcttgcttcatcctactgccagccttcatggagtaactggaactctcatataccgctggtgggaatttaaagtgctacaacccctttggaaaaaagtttggcagtttcttaaaaagctaaacatacttctgatctgtcatgtaaggagcttggaagttgtcacttccgttctcacaacaaaaaaccttagcaaactgaaaatcaacaactgagaagcacctgtgaaggtcgcagcccaggggcacaggctcactaagactgaaacctaatcataagatcatagaatgcttcccctcccttcacgcattaccaccacatcagtggggtgcttgaataatgagaatacaacggaaaggactacatgtctcagaccttatttaagaggtctgcagggaaacctgaagatagtaggagaggtgaaaaacaaggacacaagtggaaattttagcctctgacacctgcagctatagcaatcagtaaataaagcctaactcttagccagataaacaaaacttcatactaaaggcctatttacctcagttctttttaactttggtatatcatatctggctttcagcaaaacattacagtgcataccagacagaaaacactgtttaaacagacagatcaagtatcagaatcagactcagatgcggttgtgatgttggaatgatcaaactgggaactcaaagtaactatgtttaatatactaagggctgtagtggaaaacatggacaacatgcaagaacagatgtaagcagagagatggaaactaagaatcaaaaggaaatgctacaaatcaaagatagtataacagaaatgaagaatgcttttgatgagttcattaatagacttgaagtggcaggggaagaaatcagtgagcttaaagaaatgctgatacaaacttataaaaatgtgtgggatgcaagggaagtaaggcttcaaggaagtcttgcttaaataagcactgaaggcttcatttaatgcttaagaagaaaatttaaaattaataatccaagcttctaccttaggaagttatcaaaagaagagcaaatttaatccaaattaagcagaagaaaagcagtaataaaaattagagcagaaatcagggaaattgacaatagcaaatcagtagagaaaatcaacaaaagcaaaagctggttctttgtgatcaataaaactgataaacatttagctagattaagaaaaaagagaaggctgggcatggtggctcatgcctgtaatcccagcactttgggaggctgaggtaggtggatcacctgaggccaggagttcgagaccagcctggccaacatgatgaaaccccatctctactaaaagtacaaaaattagctgggtatggtggtaggcacctgtcatcccagctacttgggaggctgaggcaagagaatcacgtgaacctgggaggcggaggttgcagtgagctgagatcgtgccattgcactccagcctgggtgacagagcaagactctgtctcaaaaaaaaaaaaaaaaaaaaagagaagatataagctactagtatcaaaaatgaaagaggggctgtttctactgatcctgcagacattaaaaggataataagagaatattgtgaacagttctatgcccagaaatttgatagcctaggtgaaatggaccaatttattttgaaagacacaatttaccaaagcttacacaacaagaaataaatattctgaataggcctatatttattaaagaaattgaatcaatcatactgctcaaagcagaaatcaccaggcccagatgggttccttggtgaattctaccaaacatttcagtaggaaattataccaattatttataatctatttcaggaaatagaagctaaggacatacttactaatgcatttggtgaggctgtcatgaagctaatactaaaatcagacaaaagcattataaggaaagaaaactttagacctcttgtgtgtttttttgttttttgttttttttttttttgagacaaggtcacgctctgttgcccaggctggagtgcggtggcaggatcacagctcactgcagcctcaacctcccggctcgagcaatcctcccatctcagcaacccccaagtagctgggactgcaggcgagcaccaccacaacaccacgcctggctaatttttgcatattttgtagtgacggggttttgccatgttgtccaggctggtctcaaactcctcaattcaagcagtctgcccgtgttggctattcattatttttaaaaaaagaactcttagcaaactaggaacaggaagaaatttccttaacttgataaagaatgtaccgggcgtgtcggctcacgcctgtaatcccagcacttcggcaggatgcttgaggccaggacttgagaccagcctggccaacgtggtgaaactcatctctactaaaaacacaaaatttagctgggcatggtggcgcatgcctgtaatcccagctatgtaattgccaatgggttcaccttgcctgctgctggctaggcagctgatttattgagacaggggaatttcaatagagaatgaataatccacacagagctggctgtgtgggagactagagttttgttattactcaaatcagtctccccgagcattcgaggatcagagtttttaaggacaacttggtgggtaaggggaatccagtgagccggcagtgctgattggtcaggtcagcgatgatatcatagggagaagccatctccatgtgctgagtcagttcctgggtggggccaacaagatcaaatgaggcagtttattgatctgggtggtaccagctgatccgtcgagtacagggtctgcaaaatatctcaagcatggatcttaggagcagtttagggggagggtcagaatcttgtagtctccagttgcatgactcgactcctaaaccgtaatttctaatcttgtggctaatttgttagtccaacaaaggtagtctagcccccaggcaagaaggtggtttgttttgggaaaggactgttatcatctttgttttaaactataagctaagttcctcccaaagttagttcaccctatgcccaagaatggacaagaacagcttggaggttagaagcaagatggagttggttaggtcagatctctttcactgtctcagttataattttgcaatggggatttcagctacttgggaggctgaggcatgagaatcacttggacccaggaggtggaggttgcagtgaaccaagatcacgccactgcactacagattgggtgacagagtgagactctgtctcaaaaaagaaaaaaaaaatctacaaaaactctgtagctaatggggaaactagatgcttcccactaagaacaggatcaaggtaaggatgtcccctgtcactgtttcttttaacattgtcttggaagtcctaactaatgtaataagaaaaggaaataaaatatataaaaattaggaagaagtaaaactgtttccagatgaaatgatcgtctatgtggaaaatcccaaagaatccaaaaagaaactcctggaactaataagtgactatagtaagcttgcaagatacaaggttaatatataaaagttaattactttcttatataccagcaatgaacaattggaatttgaaattaaaaacccaatgccatttacattagcatcaaagaaaatgaaggctttatgtataaatctaaatagatataagatctatctgaggaaaaccacaagactgatgaaagaaattaaatatctaaataaatggagagatatttcatatatgtggataggaaggctcaatattgtcaaggtgtctctttttcccaacttgatcaatagagtcaacataatcctgattaaaatcctagcagttggtttcttggatattgaaaactgactctaaagcttatatagaaaaagacccagaatagctaacacagtattaaaagaggaacaaagctggaggactgataccactcagtttgaagttttgctataaagctacagtaatcaagacaatgtcatattggtgaaagaacagacatatgggtcagtggaacagagaacccagaaatagacccacacaaatacaatcaactgatttttaacaaaggggcaaaggtaattcagtagagaaaggatagttgtttgaacaaatggtactgaaacaactatacatccacataccaaagagaaagaatatagacataccaccttgcactattcatggaaattagctcaaagttgatgatagaccttaatgtaaaatgcaaaactataaaacttctagatgataacataggagaaaatctaggtaaccttgggtttggtaatggctttttagatatgaaagaaaagcacaatccatgaaagaaaaaattgaaaagttgaacttcattaaaattaaaaagttctactctgtgaaagacacctttaagagaatgaaaaaacaagccaaagactgggagaaaatacttagaaaacacatatctgatacaggattggtggtcaggtgtggtggcttacaccttgtaatcccagcactttgggaggtggaggtggaagaatcacttgagaccaagagttcaggaccagcctgggcaacatagtgagaacccatctgtacaagaaaaaattagaaaaattagtcaggcatggtggtgtggacctgtagtcctagctgctctggaggctgaggcagaaagattgcttgagccctgaaatttgaagttacagccagcaacttcagcctgggcaacagaactagacccagtctcaaaaaacaaaaagggactggtaccaaaaataaacaaaggagttaaaactcaacaacaacaaaacaaacagccaaattaaaaaatgagtaaaggactttgaatagaccttttcccaaaaaaagatatagaagtgtgcaattagcacatggaaagatggtcaacatagcaaataattttacgtgataaattttatgttatatgtatttttccttaaaaaatatgagcaaaagatctaaatacctcaccaaagaagataatgcagatggcaaataagcatataaaaagatgctaaatatcaaatgtcattagggaattcataattaaaatgagatgccactacatatctattagaatagcaaaaatctaaaacactgacaacaccaaatgttgacaaggatgtagaacaacaggaactcttatttattgctggtgggaatgaaaagtggtatggccactttggaaaacagtcctgtagtaactgatagaattgctaccagaactctgaacactgctggcctgctgcttttcttgttaccacacttcactttctcaggtatcctttcggtgatatctctgaaaagataatgacattgttagtggtcatctaattctaaatcagagtgagattttttttttttttactcagaacgtgtcaataactaatttctatctttctttcctttttttctttttttttgtgatagagtctcactctgccacccaggctggagtgcaatggcatgatctcggttcactgcagcctctgcctcctgggtttaagtgattcttgtgcctcagcctccccaatagctgggatttcaggtgtgcgccactactcctggctaatttttggtagagacgaggtttcaccatgttggccaggctagtattgaactcttgacttcaggtgatcggcccgccttggcctctgaaagtgctgagattacaggtgtgagctaccgcacctggcctaatttgtttctatcttagatatataggtttttgaattttctttcttgattcaaattattctcctaattcatacataaatattttccatttgctttctcactttattctacatatggagattttactataattatatgagatggaatggatgtaggtatatagatgtgcatagatctcatagaggtatttggtttattaaccgcttgttacttgtatttaagttcaggaggctagtgatttcatattaaaagtcgtaggactaatttggcatattctgatattctgttgcaaaacactttcatgctttgaatactcatgtttacacatacattgatgatgttatttgtctttttattagagagagaagattcatgagagatgcaagaatatttgtcctcctaaagataccttcgaaaggactcttttacatactcatggtatgaatatgtgttatttatagataataaagcatagcataaatattagtgaacaaaatctttattttgggaccttattgcctgttatatctataatttttatttctagtaaaatttttataacctatgattataatattttctaagaacttctaagagaaaaagtagatctgatagtagtataatcctttagttcaacaaatattgattggatatcttcgtggttggtatgttccttgttgcttaaaaatagatgagtaagctagacatgatggcacatgtgtgtagtcccaactacttgggaggctgaggtgggaggattgcttgagcctatgagtttgagaacagtaacgtagtgataccctaaagtaaatctatagataagtaaaaagtagctttggtcctcaaagaactgatgttgtcctgaataagtttaaagaaagaaaccaataattgtatcactgtatattaaagagtaagttcagtgtggtaatgttttataacatgcgtaacttagctttagaagcattcctagagttgacagtgattacatgtgttttaaagtcgttagtttgaaacatttatgtgggagaagacattccaagaaaagggaatagtttatacaaagccatagaataaagagagaacagaatattcaaggaactgtaagagtttaatatattggttctactgggagcaagagatgagactgaagcataggcagtggtcagatcatgaagaaccttatatgctgtggtaaggaattttaccttttctgaagacactataaagctacataatatttttaactaggcatgatcagatttatgattatacatttatgtgaaaatagttgtggatagtgaattatgggatgatgattagactagaggcaaggagacagttggaggctactgcagtaatacaaatgagaaatgatattccagtaacagttacagtggagatggagagggaattaggcctttgagaagtaactcagagattgagacacaggttttggtggccagttattggtaatggagcaaaatgattcaaggacaattcccaggtttcttgcttggacaactgggtgggtgacagtgcaattcagtgagagaggcaatataggaggaggaattttgagggagatggaggcaagtttagttgcagatttgcagtgaagaacatgcctttttggcaacctggagctcaggttgaagatttaggctgaagatgtaggtatggtagacatcatcatagacaggtatgctggacaatagcatggtagttgaatccaaggacgttgggtgagattgcccagggaagatgtgaacagtgagaagaaaacgactggtgatggagcactaattaagctgtctcatttaaggggcagacagaagatgagatacctgtgaaggagacaaaaagtggtcagagagataggaaagtcaaccaagagagaattgcaccttaaaagttaaagctagtgaggatttcagaaagtaagaacagttagttggtctgtaatgtcagaatagttcgggatagatcaatttgtacactgagaagtctcctttattttggcaatcaggagatcttagagcatttatggcagttccagaaacctcaatactatatattaaggagtgagtacaagagaaagaaatgtagactaccagtattatgtcactagaagatttgagatagattattgactacagggaacagagtggaagaatattttttcatggccaggactagatcgggtaagaggcatttgactatccctgagagtgagtgcttttgcatctgaggtcctgcccttccctcaacctggtcctggcctgggttttatctatatctatatatatctatatatatctatatatatctatatatatctatatatatctatatatatattagaatgtgtgtgtgtgtgtgtgtgtgtgtatatatatatttttttttaatgggaaagaactgagcatgtttatatacaaagataagagagctagtacaagggaagaggctgaagatactgagatggagtaaactgattaaccaagctcacagcagaggcaggagggaatggagtctaagtgcagaaagattggttttgaagaggagagtagtaccttatctgagttgggattggcaggatgaaagtaaagtaggttcatttgaagataagtgtgtatctcagccttaagatgtctgagaagaaaattaatgtagtataaaaaagcaacctttgatcataagaaattctggatgggatgatagatcttttaaacaataaaaacaatattcctactttagaatttaattcattttttaaaattacatagcatgccatattcagtcttaccaaaacttgaaaagatagcacagcagtcctcaatctttttggcaccagggactggtttcatggaaaacaatttttccatagaccaaggggtttgcggggagatagttttgggatgaacctttattatgcactttatttctactgttattacattgtaaaatataatgaaataattatacaattcatcataatggagagtcagtgggagccctgagcttattttccgggaactagatggtcccatctgggggagatgggagacagtgacagatcatcaggcattagattcttataaggagggcacaacctagatctctgacatgtgcagttcacattagggtttgtgctcctatgagaacctagtgccaccactgatctgacagaaggtggagctcagacggtaatgtgattgatggggactggctgtaaatacagatgaagctttgcttgtgcccactgctcacctcctgctgtgcaacctggttcctaacaggccatggcccaggggttggggaccactgagatagcataaagccttttatgtctgattaaaaagatttgagatgtattttgctgttttattgctgctatataattgattacaattacctgaaacattgttttgttcagcgctttgcctactactaggcatgtaataggtgcttgatagataatttgttgaaggaataaactttagttatttggatgtgacccagtacaatactgaatctgtcaaaatgtattttacggagttaaaatgaaaacaagttttaaaaataatatttcccttcttttttaaatagataaatccaggacagatctggagcaagtacctaaggtaacaaagcttaaacatgagaaaattgccttataatatttgatctttaattttgccttacaagcagatttcatttggcttttttttttttttgaccctttggctactttgtctcttgtggggctgtgttgcatcacttttcttctttctttctcacttttctttttttctttccttccttctgtcttttctgtctttctttctttttctttctgcttttctgttctttctcttaacttagacagaatcttgccccgtctcgcaggctggagtgtagtggtgcaatctcagttcactgtaacctccgtctcctgggttccagtgattctcctgcctcagcatcctgagtagctgggattacaggcgcatgccaccatgcccagctactttttttgttttgtatttttagtagagatggggtttcaccgtgttggccgggctggtcttgaactcttgatttcaagtgatccgtccacctcagcctcccaatgtgctgggattacaggtgtgagccaccatgcctggcctttttctttttttttttttaaacgaaaaaatgtttttaattgacaaataaaaatgatgtatatttatggtgttttttctcttttgcatcatcagtctctttctcatcactgaaacctacaaatattttaaaatctttccattaaaaaaattttgctgatcattcaacctcttcaaattattaagagatacttactttgtatgaaaaattttgtcgagatgtataatccatttttttctgggaagagagtcagttaccttcatcagattctcaaataggtctgtgacagttgttctttagggtaagaaagagatgaaagacacaaaaaaggtagaaggatatcatttatatcatttatttgatcctacaaaataaaactcaaagtttgtcatttaaggctcaatgttcacttcatgtaatctttacacattctttacttcagccaaacttttttttgatggctctgtgctttacttacactgtttcttgatcctggaagacttttccctcatcttcccatatctaattctctgtaatcttttgcttaaaatggcagctttacatgggtactttcttgttctttccaacagaagataattggcccttttgccaaattcccataacattttatctgggactcttccctcatccctctgctacccctttaaggatttgtccctcttctccttataagatttttttttttttttttgaggcagagtctctctctgtcgcccaggctggagtgcagtggcacaatcttggctcactgcaacctccgcctcccaggttcaagcaattctgttacctcagcctcctgagtagctgggattacaggcgcctgctaccaggcctggctaattttagtatttttagaagagacggggttttgccacgttggccaggctaggctggtctcaaacttctgacttcaagtgatccgcccacctggcctccgaaagtgctgggattacaagcatgaaccactgggcccagtctccttataatattttatcacatcccttggattgaagcttcatgagattggggtctctttaataaattatctttgtttctccctcagtgcctagcatcagaagtagtcagtaaatatttattgaattaatcaatacttttagttataataccaaagcagggattagaaaatttactcatgtctctagttagatttttttcctaccatattcattctaatttttgtatataggtaaaataaatcagtaaataaaatatagcatataaataaatacataaattgattaaaccatgttttaggccctatgctaggtgttagaggtacaaaaataagctataaatttaaccctgcaagaacatatggtctccagagggagatatgcatactaaataaataatttctataaagtatgaggtaaataattaagtatgcatgatatatttgtgttcagagatgggagtcattatgtcatgcacaacgacacatttgcccttttgattgggtcatgttcttcaggaagatgtacaagaaaaggcgttctaggccagaagtatgtatgtaaagatatgcatactttatgtattaatacactcattgtaaaaagaataagagtatggaagagaattgaatattgctagagtgtaatgggtaaatagtgggagtgacaagatacaaagaggtaagtgggtccagaaaaacaatgaagggttttggatgccattctaaatagtttggtctgtgggtcatgggaatctattgagagttttaaacagggaagttaatacagttatacttgacattgtagaggagtatctctaacagtagtataggggatagattagggaaggatatcagtaaatagctattgaagagctgaactactgaatgctgtggagatacaggaaagcagagattcaaggtatatttacaaaatataacgggtaggccttattgcttagctggtcgtgatatgtaagggaagagtagtctattcataaaattgaatttgttttggttttaatatttattgtatgcttaatctaaactaattttaaaacaattttgagcaggagaaaatagaaatataggttagagaaattgatatttggcattttaaaaaactatcagtgggaaataatgtggaaattttaggatgagtattatatctgcctctggtatgtacctgtaggactgcatgagtgagtatgatcatgtagtaatagaatgaccatctccattggtaaaggcaaaaaacattttgtatcttttatgagtattttaagcttggtgagaaatttacacatttttcttatagatatttgtgtaaagaactcaactgttatcacttgcttttgctattcatactcaagatccacgttaattttgtttaatgatcatgatgttagaagagataatgggtataaagaaaatacttatctaattgagggaaatgcatttttttaatagatttttatgaaaccagattttgccttggatgattccttaacttttaattcagttttaccatggtctcattttaatactgctggtggaaaaggaaatcgtgatgcagcttcctcaaagttgcttcaagaaaaggtaatttctttttgactttttccatgtaggaaactattctagttaagcggtactgtttgcttgggttcagatttagttatttagtaagctgtacttttaaattcatttttgttcttactgataactataagcctcccaatcttaactgataaactaacagcattttggttcaatggaacacaagttgtgcagatgaacaaggaaaaacttactatttgagtgcttcttacctgaaagagcagttgatggaattttaattgaaaggctatattagctaacacaataaattgctttgcatttgtcccagatattttatttacatactggctaattttatttatttttatttttatttttttgagacggagtctcgctctgttgcccaggctggagtgcagtggcacgatctccactcactgcaacctccacctcctgggttcaagcaattctccttcctcatcctcccaagtagctgggactacaggtgcgtgccaccatgcttggctaattttttgtatttttggtagagatggggtttcaccatgttggccaggctggtctcgaactcctgacctcatgatccgcccaccttggcctcccaaagtgctgagattacggatgtgagccaccatgcccagccccacattggctaattttataagaatgatttaaagcacagaaaaccaatattttccgaggtactgtttttcattttcacctagggatgattattttgaaacaaaaatatcttaaagaatacaatattcctattgtttttgtagctttgcaaagcctagtcttttacatgttactagtcagcagttctttacgttttacaatgtcatagtccagaagtcagcaccttgaaagtcatttaatatttagatctttaaatataatttacttatcaagagtcttctaaagacatttgatctctgttctttcttagcattcagtttagagctcgtctaaaactgaaggtagttcttaaaatgagaagtagtgattttgttttactttagtgatatcccctggcaatctgaaagcttgtctcaggaagacatcaataatatcaggttcagtcctcatcaggaactgaagaaaagactagcttggggaggagagaagaagaaatgtggggaaggaatcatgagtattccttttctcacaattgaaaacgaaaatgagctttttcctttggcaacattgtcacctataaaaaggtttttccatgcataagaacaaattgataaatctgacgaaaaccatgggtttagagacacaggcttgctcatgacacaggctttcatattctaagtatatgccctgagagaataataccttaaaaagagaaaaacagcaaaagccagtaaaagtctcatcaatgtatacaggtacttttaatacagataatttaaaaattatttcctttatagcattttaataggaagtaaactataaaaatgttatgccttgaaaagagtaaatcaatggattattgaaaattcaaaaaatctttgagactcaaatgcttttcttatgctgaatgtttaaagtgactaaaataatggaaattttttttatttgtaaattgcagaatcagatttgctatatttacattctgactccttttcgttctgctctgttcttagaataggaatagaagacaggattccaagagagcactttgaaactccttttatgatggacaacagctggtttatcatgttcgcttttaagagcaaggatgctataactagaattaaagaaatttgtattctattgtactgtgcaaagtgctggtctgcagtaaaataaggagtttgcactggaatgcaaatcactgcactgcttacttcattaagaaagtctgaaaaaaatacagtgtgcttaatgatgtagttgatttactttctagcaaaattctttattttattatggccctgttaaacagtccacagattggcagcagcatataaatcacattctgggtagcactgtcctaaagttatctattctccatttactattctgggaattgagtccatgttaccttgcaatttaccctagtatatttgtgcccattttgcttttttagtgaataaatgaacagccatattgaagatgaaagagcaaaagggcataaactcaagatttaaactgtggaaaaatttcttgtttgtaacctatttagatattgtaagattattgaaggagcattattgaagatatgaatgatactctgtgtttccttagggaaacagatttgatgaccaaatagtctcttctaatcttatgagacctaaatgttgaaagttcattaaccctttgaaactatgaattatcccaagacattcagagataatgcccgaagtctgagctgtgggttaaaaaatctcaaagtaaaaaaatgggtgaataatggaaagataatatagccaaaaaaggcatatgcagttagaaaggaagaaaaggcaaaacaagttttagaagtccatatttgaaatttagaaagcattttaaatatatattaccataagaattaatcttggtaatgctactaaaaaaatatatatgagctaattgtttaaggtatttgtcgaacttttaagaggaaaattcattggaaataaactgaattttacaaattgataaaagaatcacttttgaaatgtaaaataagcagcctgaaaaaaatccaaatgaattttagtaccttatctataatttgtgactgaaccatcagtctatcttggattattcagcattttgaggcagaatggtataatagaaacagcttcagtttttcagtcagagatataccaacattttagttttgctacttagtaactacatgactgtgtttcctcatctgtaaaatgataataatactacctatatttcaagattgttaaaattagaaaaattagatgtgtataaaatacctgtgcctaatccataggaggaggtcaataaatggaaggtgtaatcatctatttagtcagataaatgatgtgcaatgatattgggggctaaggagatcattctctttctctcagatcttagaacatctgaaactggaattgtaatttgagatgtctgtggggtactcttttagaaagcagttggtgtttggaaggtgataatgacaggaacagaggaggaaagtaaatgaccttgtactcttttgtcttacatttatatctttggggtgtaccctttatcttccttccattttgttgtgcccaatttcaaggatctcacaatcaaacaattcacacaatggaatttaaagtatatgtagaaatcttttatcattgtcataaagtatttggataatcaaggaaggtatgctcatagtacttcatattttttttccttctcttttaagctgagccattatctggatattgtggaagtaaacattgctcaccagatctctctacgttcagaagcattttttcatgcaatgacctctcaacacgagttgcaggactacctcaggaaaacttcccaggctgtaaaaatgcttcgagataaaattgcacagattgataaagtaatgtgtgaaggatcactccacattttaagactggcacttaccagaaataattgtgttaaagtatacaataagctgaagttaatggccactgtacaccagactcagcctacagtacaggtgttattatctacttctgaatttgttggagcattggacttaatagcaacaacacaagaggttctacagcaggaacttcagggcattcacagtttccggtatgttcattaagtaagccactagaaataatgttagaaatttttaaaggataaaattgagcatgtaatgttaaaagtgtgaatatattcaaagttaaatggatattttttcttccagattgatcatttgtttaataatgttattctgatattgtagtattagcaaaacaaaaaccataaggaataatattttcagagacatttggatggagaagcaaaattaaaatttctaggagatgagataaatgcaaggccagtcacaacattaacattttgaaagtgttgaaatagctttgtgtcacaatggtaggtcaaggtggagagaataccagcatatttaaaattaagtttgtgttgaaagcctttaatagatttaaaattgaataattattaaaattcatttctgatttgcagtctgtttatcaaattgcaaaagaaatccacatggtgatagaaaagacccaatttctcctgttattattttgaaaataccttaggttttaaatattttatatgaaatcattccaaagtgtttattttatagactaattgcaagccatcaaaatttcgttccattaagcaggcttgcagtatccttgtagaagttcatatctgctgggaaaaccatccaaaccacgtactagtaagtgactataaagttttatggaagatgtgctctgtaacttaatccattatggaaaagttagcttcaaaatacatttattttaattgaattataaatcttattgactgaagatatgtaattggaatgtttaggatatatttttaaagctgaaaccaaatttaattagatgaacaattgattgattcattcagttaaggtatggctgttgagcacctattacatgtcaagtaccagacagaatgaatactgggaatatagtcatgaatgaagtagagatgttcagtgctctaaaagtctctacaatttatttggcatggggaaggaagcagacaaattactgcatagttatgatatagtgtaatatagtatgatgaatggaaagattgctgtggagctctgaccttaggggtggaacctaatccagacttggatggttaagaaaacgttctgagtcacaaacttctttgagaatccattgaaaggtactgttggaccatctttccacaaaaatatacctgtacataaaattttgcaatcaattttgggtgattcatgtttttttgaagtctactttgaattccccagcatggaacccagggcaactaaattatttttaatttttccttcacctttgaaattataaggatttatctttgaatttgtatgtcgtatgtattttttcaataaatgtcaattttgtcattgccttagagaaatggatttctataatgacagaagctgtgtttttaacttatcacttactgtataatatcatgagtgttgatgaatattgggagccagtatcccatagatagtacagagctgagaaatagaatcaaagattgaatgccgccttggcaaacacaaattctcaaattgttctaatttttacctcaaagttcatgcagtttacttttactttccttgactcataagtttatggtcaatactcatgaaaagtaattttaagaagagggttggatatttatttattctcagtagtttatgatttattgggttacagaataaaaattttataatcttgtatttattatgagctcaaggaagagcttacctttgttttcaaccttactttttttgtttgtaccttaagtcaaagtataaaatattcttcatttaaaaatgtctattatttacgtatgtatttatttcgagacagggtttttattctgctgcccaggctagagtgcagtggtgcgctcttagctcactgtaacctctgcccccacccccagtcccctgctaccctgttaactccccacccaccaccagctcaagccattctctcacctcagcctcctgagtagatgggattaaaaacacacaccaccatgcccagctaatttttatttatttattttttatttttttgagatggagtctagctctgttgcccaggctggagtgcagtggcacgatctcggttcactgcaacctcctcctcccgggttcaagcgattctcctgcctcagctcccgagtagctgggattacaggtgcccgccactgtgcccagctaatttttgtatttttagtagagacaggttttcaccatattggccaggctggtctcgaactcctgacctccggtgatctgcccatgtcggcctcccagagtgctgggattacaagtgtgagctaccgtgcctggcctgatttttatttttagtagaaacggagtcttgccgtgttacccaggctggtctcgaactcctgagctcacgccatctaccttcctcggctccgcagagtgctgtgattacaggcattagccaccatgctcggccaaaaatgtttatgatttttaaaaagactttcagatgttctgattttctacattttgctcaatatctttctatttttttttagaaccacatgtgtaaagagtgttatttcttcatgtaaaacatttctgtaaagtttcctatcaaatgtcagttccaatatatttataactgtttaaaagtttggtatcagaacttgagtctctgacttccaataaacatatagcaatttattttcaaaaacaaaagtactctaaaagaaaatgtttttatagtcaaggaagaatactgaatcatacgtgaagtagtttaagacttgttattataaccccattcttttgtttgtgttttgttttaaatttgtgtcaaatcctatatgatgatttactttcttgactttatctttccttttgctaaaggttgttaaatatcagcattagttactttcttatatagtttcacagatgtttttaagaccatttaactttatttagaagcataagaattagttttggacgctttatagattgatttttatccagtacaatatgtattagagatctcttatggtaacataagcattaggttataagctgttctccttagtttattaaaataattacactctcccattaggaaataagaaatattctacttgaatttcacacgtttttgtcttttttatatcagagtccatattttagtcatttcgtgggccatatactaagccatagggtcttacttgaaataagaaatctttcagtaggacaagcaaaggactcttttaaatttatttgttaatagtctttccattttatgaatcttagtccaagttttgcttttggctatactgttctttgtattgcttttttaaaatgttctatttaatatatatatgcagtcttgccctgtcacccaggctggagtgcaatggtgcgatcatagctcaactatagccttgaactcctaggctcaagtgatcctcctgccctagcctcctgggtagctaagactgtaggtctgtgccaccacgccaggctaatttttaaatttttttgtagagataaggtcttgctgtgttgcccagactggttctattgcttttaaagggaactttcataccacaattttccagtagttaaattaccacaaatgcaaatctctgttttcaaaaaggaattttaatagttgtatttgtctgccatttttctgtgtactattaacctaacatcacattttttctagtcattagtagcaaataatgcttacgtgtgtcttcttttttctcattccttctgtattttttgactttgaaattatttttcatgtaaacttttttggtgacctctgagctcccagaacaccttgtttatattctgtaatgaaattttacagtctcctaccatgttttgtcatggtttgtgtttttattttaaatctttctattgggctttgaatttaaatgtcttggacaagagctatgttgtacacatcttaatatgtatttgtgaaatctgtgaattattcagtatattaccaaatgtatcttgacactttattccactctttttttttcctgtctataatcattgtccctaatttcccatttataatctatatgactataattcttaatcctggctgcataataaaatctccagaagagcttttaaaaaagtgtgccacacctcacccaagccaattaagtcagactttctagaggttaaggcttgagcatgtgtatttttttgaaagctctctgggagattctaatgtgcaccataattgagaagcctggtttataactactattggatactcaactttttcatgatttgtaattaaagtggtagcatcttcctacatacatttgttctttctaaaatgaaattttcaactaacacatcttcctgtctctattcaaagaggtttctactaatggatttgggggtatgatgtatctgtataagttccaagtttgatttcccctcttcagaacttgaagggtaattttgactcattgcataactcataattattattattcttttgtacatttgtagaatttttaaatttaaaaaattttgaatgattgtactacctgaattgttgcaaaattgggcaattttaattattaggacataaattttttttttttttttttttgagatggagtcttgctctgttgcccaggctggagtgcagtggtgcagtcttggctcactgcaagctccgcctcccggattcacgccattcttctgcctcagcctcctgagtagctgggactacaggtgcccgccaccacacctggctaattttttgtatttttagtagagacagggtttcaccgtgttagccaggatggcctcgatctcctgacctcgtgatccgcccgccttggcctcccaaagtgctgggattacaggtgtgagccaccgtgcccggccgggatataaatatttttaaccattacatgtgaaatgaaattttgctatctattaccaataaaaatgataatcattgaaacaatatatatcatttatatactaatttaactaaaagtattgctgaggctaatggcattcaaatgcttaagcagatgtagtacataagtctcgtgagcccaagaatgcattcgaatgttgatatcttgcaggttttgatacagaaaatctttagttaccttgaaacttagggctgtggtgtcgttatttgctcttactgtaaagctttgtgtagaaactcttagttttcataattgtcgttaacactctattcctactacttcataccatgattactaccaccgccattctacaacagaggacatatattgaatacttgagtattctgtaccagatactgtgctaagtatattgacatcgcccactccccaaaaaactgtgagatagggaatgttacccacactttacagataggaaaactgaggtcatatagcaagttaagtaacagtacagtagagattcaacttgggtctcactgggcttgagagctatgctttttaatatatttgtttgaggatcttatggggcctcaaatagatcactctgaacatcaatactaatttgattgtacaaactgtgggcaattgagctataggtttgctcagcagccaggaactaccatattaatggattttggcgtaaaaattactgcagctagcttgttttctacttgtaagcctttttttgttttgttttgaaagaaaagatgcaaaacactcagtttattatagattccagtttattatgatttcattgatcagtggccactgtgagattccatttaagggatctttattattggatgtatcaaaaggtatttaacatgttatttgaccttaaatctcctataatttagattttaaaatattgtagtaagaaaacatccacattgtatgttttgtgatgaagaaatcagacttcttactatttgatgaaactagaattctacagagtttattgatatacaaggttttctgataagaacagcacagaggtcactgtattgaacatacagcttagtagaaggtctgaattaatgtgcaaattgaggcatatctaagtagaaagtattgggattgtttcagtttacttagctggatatatttttcagaaagtgatattttagttgtcatttcagtagattcaccactctaaattactgtatgtgattattaggatacatacttttaaaacaaggtgttagcagatttatcttaaatatttttgttaaggttaataataatgcatacatcattattattgcatctattgtcaaagtagccaagaatatacaagaatagattgaggatgaataggtgaaacttgtaaaatattatagttctgaaagttgcatttaaggatttgtgtagacaaattcttgcatatataaaatacctgtgattataaaataagtactgtttggtgttagtattgaggttctttattaaattaattatatagcctgtattagataattgaactttaaaattactgtaaggatacataaaaatgaagctattcaagttgtttaaaataatatctaaggtcaaatagaacattgcatttaagttgtgccgaaatgagggaaagttttattattttgatgcccaaatatcagtaggtacagtcatatggacctcccaccataattctttatggagatttgttgaagattatttatacttgaggtaacacatacctgagtgctaacctctagtctgcattaaaaaagaatcaatgatcttcataaaaataattgagagccaagcaatattaggtctaaatttatatcctacactgtcactgtttttttttaaacttatactcaaacatacacaacagtaaaggaaattatatgaaaagaattataggaagctagatgaattgtttatctaagttgtcaatgcaaagcaaagtttgttttatctgtatcctgtattattttgtaacaaaccctgaacattttgtttcattcataaatatttcattaggtatctttgaaagataaggattttttaaaaatataactctaatgtcatttatattttcaaatatagctagtcagtgttcagattttcctgttagtctcaaaattctttcttatggtgtgtttattgtaatcagggtccaaataatatctatatattgcaattggttgatatgtctcaagtgttttttgatccatagttatccattctaattttctttcaaaatactaatcgaagaaactgggttgtcttatagtgcttcccatagtttggattttgtaaactatgtttccatgtttagcatgttattttttcacctatattctctgtaattgatagttagttttaaaagcttgattagctttaaattttactttttaacaagagcacctaatagacagtggtgtgtatttcagtcaagaagcatgaaaagtctctcttttgatgattagcagccatttaataattgctgtctagatttatcattaattgtgggctacaaattatgatactctaattctatcccactttctttacttattcactggaatatttctatgaattgatgtttccctataacaattatttggtcaccctttgaaggacaattcttacaagattagacaggataaatgctagattcttttcctttatttagctgttttcaaaataacgaattggaaatctagcatcctccaaagataactgatgaatttttaaagatattataaatacatggatttatatgcaaagtgttttaagttctttctttttaatttttatcaatgttcaaattgaattatcatttgtaggaacctcctcaagttcattcttgagtctttttgacatgatttcctaagtagttattgacagttttcttactttgtgttatgacaggatgtttatagtatgcatttcctaccccagacctgtaatctgccatttgtctagggagccctactttcttttagtaggaaatagtatttagaaatccatatgggtagtaggcatgttcttgctactggattggccattatttctaggcttttgtagtggacagaactgggaaataattttcttttttaagtgactttgatacatcttaaggaaaagaagaggaaaaagtcctatattgtttgtattaataatattgttctgagacaatctgtgtatgttgtgggataaaacaagtgaggaattatgttagtgtcattagtaatcacagttttcagcctgattaaaaggagacgcatatgtaagattgaagaagtgaaaaccatatagtcttgaatttaaatggaagtatcagtatgacctcagtttttctcccccacaacccctaccataagtcgccatttaaaagttttagtttgtatctatctatccatccatctatctgtctgtctctcatcttagataagtgttagcgcactgtacatactgttctccaccttgctgtttttaccttaaaatatactctggatattgtacatgcgctacagcatgcattctcaatgggagatactaccgcaagagggcaaatgttgactcttgaaaggtgaaaaaaaatcttgaatataacaatggtttttgacccttcaaagggccatagtacataaacagatatataatacatttgtggcattaaagtttcctaggggtggctgggtagcgtggctcatgcttataattccagcactttgggaggccaaggcgggtggaccacttgaggtcaggagctcaaaaccagcctggccaatatggtgaaaccctgtcttttactaaaaacacaaaaattagctgggtgtggtggtgcatacctgtattcctagctacttgggaggctgaggcacgagaattgcttgaacctgggaggtggaggttgcagtgagctgagattgcaccactacactccagcctaggcaacagagggagactctgtctaaaaaaaaaaaaaaaaaaaaaaaattaaaaatttcatggggttgtgtgtgtgtgagattagaaaaggcttctagaggggaaataatgaaaaaaaaactgctctatagctgtatgtataggtatttatcaattcttttaaaagtgagtaatatctatttaaaataaatgcattgtgatttattcaaccattctccattggtcagcatttgggttgtttctattctgttacagttatcaacagtagggcagttaatgtatgttctttggtatttttgctcatgcatctttgagacagattctaagaagtgagattcctaggtcaaaattcctctgtgattttgctagatactgccaaattcctcttgtgacaatgttttagtttgtactggtggaaatattctaaattagtctactgtaagatattgatgccatttatgagaacgtttttagtctattaactataagaaatataatttcctgttgtaagatgcaaacttacatgttatttcacttatcagatttgtttcataattatcactactcctacttaccatatgttgtttataaaacaagaataatgcatctacccaaaaggtcaaatggttttaactaattttttaaaaattgtgttatatctcatctttcttagtaaatatagttgccagtattaaggatttgtttttcaagtaaatgtagtgtggatatagtttaaatgttttttaaattttaatgtaatataaaatttaaatgttttaaaactgcccctcaaaatagagcttaaaacatttttttccctgagatataaacatattttccattggactctttcacttaagttttgaaattctttggaccaactaggttatctaggcttctttagctcattgcttttacacagctatttgaaagtatggcagaaatccctttgtatgtgaaagtacttcatccttacatttttcagtcttgtgtttcaatgactttcagtttaatgacttaagcgatgttgcacagtaactcaaactgattataagaaagattgaattgagtccatctgtacatacagtccttcagatatttatttgcacccagaacagggcctagcgcagggtaggcacaaatgtttgttgaataaatgaatgactagggagctaccaccattgatattcagtaaatagttaataaggaaaggacttagaatgtcaatattttgtctgtggaaaacaatcataaatgtacccagtaaccaggttttctagaacacatttatttggaggctaaaggtacacctttgaccttgaacaacatgggtttggacttgtgggtccatttatacacagattttttttcagtaaatatattggaaaagtttttggagatttgtgaaagttgaaaaaacttaccacatagcctagaaatatatatgccatgaatgcataaaatatatgtaggtactagtctattttatcatttactaccataaaatatacacagcactatttaaaaagttaaaatttatccaaacttgcacacagactgtatatggccccactcatgcagtattaaatcataactgcagaaaactaactgtggtacatattgtaccactgtaataatttcataaccacctcctgttgctactgtggtgagctgaagtgatgctagtcatctatgtttgagcagttcctctctccagtaaattgagtatcacagtaaaaggtgatctcttatagtttttgcatggtttttattgtctttaatacatactatacaccttaaataacaccatgggacccatactaagttcactggtgatgctggaagtactcccaagaagcagagagaagtcatgacatttacagtaaaaagtttaattccttgatgtgtatagtagattgaggtctgcagttgtggttgcccatgactgtaaaaaaaaaaaaaaaaaaagggaaatttgtgaagtcctcactccagctacaacagcatttacaaaaaccttttctttttgcaagtacctttttatccattattgaaaatgcagattttatgcaggtgcaggcttactatgagaaaggcatacctatagactctaatattacttgagaaaaagctaagatatcaagtggtaatttaaagcaaaaggaaagtgaaggatctaaagctggagaacttaatgccagcaaaggatggtttgataattttagaggtttggcttaaaaaaatgtcatgataataggagaagcagcttctgctgacaaagaggcagcaaatgagttcctggataccatttagaaaataatggaggagaaagaatatctacctgaaaggttttaatgcagacaaaagtgccctactctgggggaaaaaaaaagccacaaagaacatttattagcaaggaagagatagtgagcaccaggatttaagacaggaagggataggctatctcttactgttttgtgcaaatgaagtcaggtttctgatcaggactgcccttatctataaagctgctaacccacaagcttcaaagggagaagataaataacagctgccagtcttctgcttatacaacaaaagacctggatgagaaccctttttctggattggtgccattaatgctttgtctctgaagtcaggaagtaccttgccaataagagactgccttttaaagtacttttggtgttgaacaatgcccctgtccacccagaaccccatgaattcagcaccagaggcattaaaatgatctccttgccccaaacacaacatctctaatctagcttctagatcagagagtcataagtacctttacagctcattacacacactactctatggaaaggattatcagtgctatggaagagaaccccgatagaacatcacgaaagtctggaaggattacaccattgaagatgccgtcattgttatagaaaaagttgtgaagaccataaagcccgaaacaataaattcctgttagagaaaactgtgtgcagatgctgtgagacaatcaaggaaatcatgaaagagattgtggatgtgacaagggtgaggaatgaaggatttcaagataagaatcttggagaaattcaacagctaataggtaccacaacagaggaattaacagaagatgacttgacggagatgagtgttctcaaaccaatgccagacaatgaggaaaaagagatagaagcagcagtgccagaaaacaagatgacattagacaatctggcagcagagttcccattattcaagacttcctttgacttcttttatgacatggactcttctatgggcactgaaactaaagcaaatggtgaaagaaggattggtaccatatagaaacaaacatttttagagaaatgcaaaagtaaagtcagaaattacagtgcatttcggtaaagttatactgagtgtgcctgcctcttctgcctccacttccacctcctctgccacccttaagatagcaagaccaacctctcctctccctcctcctcctcagcctactcaatgtgaagataacttttatgatgatctgattccagttaatcaatagtcaatgtattttcttttccataggattttcttagtaccatattttctctagctttattgtaagaatatagtatatggtacacataatatagaaaagaatgtgttcactgactttatgttattggtaaggcttctggtcaacataagctattagttaaatttttggggagtcaaaagttatacacagatttctgattgcactggtgtttggtgcctctaacccccatgttgttcaagggtcaactgtaaagagaaaaatggaatttagaagatgaaatgtttgcagttattttggtaagttaaaggacttcattttttgaaaacattgcattattgcacaggtactgtcaactgaaaaagttttacctactagttcccttgattgtggagcgaatttgtagtttttagtgaatataaatataacatttttctcttcctttttaggcatttgggatcacagctttgtgaattagaaaaactgatagataaaatgatgattgcagaattttctacttattctcacagtgacttaaatagaccactggaagatgactgtcaagttttagaagaggtatgtgttttaactgtggaatgaagttgatgccattgcttaacagtcttggcttagaacacatttttctcagattataggaatcaaaattatcttaaatttcaagggctatcagacctatgaagtccttcactagctatgtgacttgagcaagcaccatgattgttcactatcctatggaattagagaataaaataattgtatagcttaattagaaattagagttaaaatgagcttacagaccaagttaaaaatacagatataggatgaattaatttatattctgtgtttatgtgtgcgagtgctggagcttgtcttttataaaaagtgatcatagttgggcgcattggctccatgcctgtaatcccagcagtttgagaggctgaggtgggaagattgcttgagcccaggagtttgagaccagccttggcaacacagggagactccatctctacgaaaaataaaaaaattagctgggtgtagtggtgcatgcacacctgtagtcccagctacttgggtggctaaggcgagaggatcacttgagtccaggagtttgaggctgttagtgagccatgattgtgacatagcaagaccctgtctcaaaaaaaaaaaaaaaaaaaaaccgaaaaagtgatcattatcatatggtaattacccgtcattcaaatttactgagtacctattatgaacatgttttttatatatgtatatacaaatacataatatccaggcttcacttagctggtaacttctcagtgttaatcactgacaacaactagtaaaaaatcccagaaaccctgataactgcctaagtaaagaaacttttgtagatgttagcagttgacttcccactgtgagagtctaggtcattatttcagtcttctagactatgcattacaaagcatgggtgaggtgcagtgggtcaggcctataatccaagcactttaggaggctgaagctagaggatcgtttgagcccaggaatttgagaccagcctgggcaacacagtgagtctacaaaacaaatttaaaaattagccaggtgtggtggtgcatgcctctagtcccagctactcgggaggctgaggtgggaggatcacttgagcctgggagatcaaggctgcagtgagctgtaatcacctcactacactccagccttggcaacagagtggaacgctgtctcaaaacaaagaagcaaaaaccaaaaaaaacccacagggcccatggagtatttattggtcatcagggtgtgagaaggatattttttacttgttgaaactagaacaaaaaatacccttgtattgttttgcccgaaaaccagcttcattggttcactgtggtggggtaggatttatctgttttacagcactgactccaaaaatctcatgataagattgctgtgggaggggttttcaggctgctagaaaatactttgtgcaggatagagatctgaggatcaaacagaactcttgatgctgaatatttctacctctaagtaaaattacttcatatttaaaatgtcaagttacatacttttattttaacaggaaagactaatatctcttgtatttggacttttaaaacaaagaaagcttaattttttagaaatctatggtgaaaaaatggttattacagcaaagaatatcattaaacaggtaattatgcatttttatttgacatattttggtctggaacctttgtgaagtttatttttatgttatcctagtaataatatatatagtgtaatagtaatatagctcatttatgtaaaaactgaaaatttagaaaaatgaaagtaaaacatagccttaccagccaaaagattattgctataggaatatttccacgtgtagactgattttcttatgttgtcattatgtgtatatgattttatacatatatttcagttacaatcataagcagtttctcatattattataaaagctttcagaaacatcatttttaatgattgtgtaaagtcccattaacattatgttaaatctacttaacttttcctctgtgttgaatatttaggttgtttataatttaatacaataaatagcactgtgacagacatctgtggtataaagttattttgtttgtttttcgtacttaagaatgtttgttcttagactgattcctagaagtattggttagagagtgaaaagtatttttaagttatttgatgtatagaatttaattcctatttaaaaagatttgccaatttatactcccatcagcagtagacaaatgttcatttcctttttatcctaatctctaagaaattataaactagaatccatgtgtttttcagtattccctgatctttgttttgactttttttagtcagataaatcttatccactgaacttcagttttttaatatatgaaaaagataatatgattttaaaggtatttattaggcttaattgattattatcattaggttgaatgtacatatatgagtttttaaagtttaagtttaaaagttaaataagcaaaaaaattataatcatcccctctttcaagcactgattaaaacactatttttaaattggtacaaccactttgaaaaattgttggcaatatatagtaatgccaaatttgcatacatgttgtgacccagcatttctattcctaggtatgcacccaacagaaatatgtatataagttcaccaaaacacagcagaagaatgttcctggcagtactatttgtaattttaaaaactggaaacagcccaaattccatcaccagtagaaaggataaatagaattttgatgtatttgtacagtggaatactatacattaatgagaatgaatagattacacagaataacaaatgaatatcatagacataacgtggagccaaagaaaccagacacagaaaagtatacattgtatgattccacttatgtaaaactcaaatgcaggcaaaattattctatggtttaaaaatcaagataatagtatattttgggaggaagtagtaactggtaggggaataggggaggagctctgggtattagcaaggttgtttcatgagctgagttctgattacacagatgtactccatttgtacaaaaatattgagctgtaaacataatttgtacaattttctgtatatatattttaagcaatttctaaaaactggtatgtttcaattcccagacttcaaatctaagcatttattttttaattttaaactgttgcatgtatcacaaggaaatgtaacttctaatactaatttcttttgggattttaatatggggcttacaccttgttcctaagtattatagttctgcttttctggtgtaggattttgaacagttttgaatattaggtgattttaattattacaattcaaacatactctgaaataattatttaattggctaattgtaatcagcttttcaaacactgtgagagatacataagagataaaaatctggtaaaataattattgtagccagtaagagcctttaaaatttttttttatcttaagttcaggggttcatgtgcaggtttattatgtaagtaaacatgtgacatgagtttttttggtatagattatatcatcacccaggtattaagcctagtacccattagttatttttctggtcatttctctcctcccaccctccactctccaatagtctccaccgtgtggtgttcccctctatgtgtctgtgtgttctcatcatttagctcccacttacaagtgagaacatgcagtatttggttttcagtttctgtgttagtttgctaaggataatgagctccagctccatccatgttcctgcaaaggacataacctcattgttttttttatggctgcatagtattccatggtgtacgtgtaccacattttctttatccagtctatcattgatgggcatttaggttgattccatgtatttgctattgtgaatagtgctacagtggacataagtgtgcatgtgtctttaataatagaacaatttttattcctctgggtatgtaaccagtaatgggattgctggattgaatggtatttctctctttaggtctttgaggaatcgctacactgtcttccacaatggttgaactaatttacactcccatcagcagtgtataagtgttcccttttctctacaaccttgccagcacctgttattgttgactttttagtaatagccattcttacttgtgtgagatggtatctcattgtggttttgatttgcatttctctaatgatcagttatgttggccacatgtatgtccttttttgaaaagtgtctgttcatatagtaagggcctttttaatgtacaaatggaacatggaatacttaggatttgaaagacaattaatcaaattgtttttgttttttcttaaattttgcagtgtgtgattaataaagtttcacaaacagaagaaatagacacagatgttgttgtgaagtaagtataaatatataggttggtggttatcagtcagagaaaagatgatagatgtaaattagaataattcgaagtagatttcgttaaggaattatttactaaggtgtgagcagggtgtaggaaaatcacaagtgacagtgtggaacgaagacagtgcttaacagaattgaggagaaaggtagttggaaaaaaagctgtgaccttgagtagagggaagcagtcaccctgaggcaacccttgagagagacaggagaaataggtacctttactagagagctagaggagtaggtacctttactccttccagtttttgtaagggctcctcaatggccaggcccacatgttagcttcccagagcagagagcaggatggacagggacagaacatagatatggagaggtgaaattggagataattcattacaggggcatagcaagcattatgtttaaatttgtagctatgtaattaaaatcaacttttaattggctttgagaagtttgagttaatgattttgaattgcccatgtttgtattttttttttgttttcaccctagaaattcctattcttggccaggcgcattgactcacacctgtaatcccagcactttgggaggccgaggtgggagaatcgcttgagcccaagagttcgagaccaccctgggcaataaagtgagaccccatctctaccaaaaataaacattaaaaaaataagttgggcatggtggcacatgcctgtagtcctagctactcaggaggctaaggtaggaggatggtttgagcctgggaggtccaggcttcagtgagccatgattgtgccactgcattccagcctgcacaaggaagtaagagcctgtctcaaaaaaaaaaaaaaagaaagaaagaaagaaagaaaagaaaaattcctattctattattttaagaagaatagtgataatattttatgactgaatttcttgttcatatggatatttaaatgtttttagctggcttagatatgactagcaatatgtacgactgtgaaactttcttgggccaaactcacagaatggagtattaatttccacactattatctagggaaaactcaatttcagaattagttgaagcaaactataataatcagagaattgttagtggttggaaaacataagtcattgggacactattagaagctccatggatgtggagagtcagtttttcttcttccctagggaattttctccatagaagtagagaacttcctgtatatcaagtgttgtagtatctttttagaataaactcttaactgaagctgcgtttattaaaaatttagagtaataagtcattttggtactataaaatatctttagggaatgaatttgtattactttttttcaccttgaagttaatgatttctgtcaactatcaaaataatattggctgctgcttacatggtacttttaaaaatgtgtcatgaattgttctaagtattttttattaactcatataatatttacaacaaccacataaggtaggttctgtcagtttcctcatgttagatgagaaaattggagcgtggaggggttaagtcacttgccagagccacatagctagcaattccaataagctgctgctattttaaaccaaggcattgtgttgtggttccagggctcttaactcatgccatattacttctcatatggtatttttaaagttgtagttagaaaagcagattattaaattttggggagagatgtatgtttccatttttattccagagtatatcttcacacttatttctctatggtttattcattcaatgatcataaagcttgttcatatgaaattgatatatgatatagttaacttaccagtcttaaaaatatttaaataagccataactctttggtaatttacctcttcaacattttagttaggtatctagatgaaattgcattttatcactagatagtatttagtctcatttcttccagtttgtagatgttatattgattggcccagagacaatcattatttttgtttgaattatttttttctaggcttgcagatcagatgagaatgttgaattttccccagtggtttgatctgctcaaggatattttctctaagtttacaattttcctacagagagtgaaggtaagcttataaattagtttgtctagaatatccctaaaattaagtcagctttctagatacataatatgtaaataaagactcaaactagaataaaacacagtttctttgtttttgtaatttttctaaagaggcttgtttttaaataaaaatttaggtacctcagagtttgacagttttaagaatttaataagttataattttataacttaaaaagaaatatgctcttactttacattaaatattatacagtaatatttcctctcgtgattttttgttctcctaggttatctagaggtacaatattgttaaacaccccaaaatcaccccaaactatcaatttttctataaagtcaatgttgatataatggtgttttaaaatatattgtttatattcaaattaccttgctaatttactttttttttttttttttttgaggtggagtcttgctgttacccaggctggagtgcagtggcgcaatcttggctcaccgcaacttctccctcccgggttcaagtgattcttctacctcagcctcccgagtagctaggattataggcgtgtgccaccacgcctggctaatttttgcatgtttagtagagatggggtttcaccatgttggccaggctggtctcgaactcctgacctcaagtgatctgcccgcctctgcctcccaaagtgctgagatataggtgtgagccactgtgcctggctgctaatattctttatttacatttttattcactttttgggcacgaatccaatcaagcatcatgtgttacatttaattattttgtctctttagtcaagccacttaattttaaaccacttagtataacaaaaagaacaggtcacgtatcattttacagaagatgtcagactctaatacatactggtttgaatcaccaacatgtcataactttggtttaagaagaatacaggctgggcacggtggattacacctgtaatcctatcactttgggaggccaaggcaagaggatcacttgagctcaggagtttgagaccagcttgggcaacataatgagacctcatctctacaaaataaatttttaaattagccaagcatagtgatgcacacctgtagtcccagctacttgggtggctgaggtgggatgatcacctaaccccagcaggtcaaggctgcagtgaggcatgattgtgccactgtactccagcctggccaacagagcaagactccatctcaaaaaatgaaaaaataaaaataaaaaaagaatacaatcattaggaattaccatgtgtaacagttaaaagggaccatttgtgaaattagatattttttgagttatcaagtgttaacattgtgttttatgtactagttaacatccccagcatctcctgagtaccatgttaaatagtgcaggggactttggtacttgtgtatgacattaattttcctttattcacattgaagcaatgctaagtcacatgtgtaagctctccaatcaggttcacaaaagttttatagagtgggattcactgtgcttaatttagactgcttctaaaatgttgatcctacctatagatagtgacagacacaaacttgtatctataggtgttcaataacaaaaccatgttttcacttcttatattctgaccatgacctcatcatcacacacttcaattattgcatgtctagttatatagaactcttacattgcatagtgtagaattggccaactttttgccagaaattttttgaagtacagtaagtcttcaatgttatggataggtcttggaaactgtgactttaagtgaaacaacttataccaaagctatttttttcactcatcattatagtgaaacatttccttcaatgtttttttcaataacactgaaggaaacagtgttattcaaaaacctgctgtacgtggtttcacttaaagttatagtctcccagaatctatcattcagattaagtgaggatttactgtagttattccactatgtggaatggctctatgtcagttaaactaagtagagttattattttatgtatgtgctatatgaaaactgattgattatagttgtaatttctcattttcacatttggaccacttaaactagtacttatgtacaacatctttacagatgacatgaaatatggtacttttttctgtgaaaaaagtttgtgattctgtcaagtattacttcactgaaaaataatgttaattacaagctgttcatttttattgaagaatttaaaaataactaaaaattggaaagaacccagatgtctaacaatagagaaatggtaaaataaattatgcttgacacattctttaccatggaatattatatacagccaaggatttttaatggtaggagaaaatacatacattatgatattcagttaaaaatgcaagatacagggccaggcaccatggctcacacctgtaattccagcactttgggaggccgaggcaggcagatcacaaggtcaagagatcgagaccatcctggccaatatggtgaaaccctgtctctactaaaaatacaaaaattagctgggcgtgttggtgcatgtttgtcccagctacttgggaggctgaggcaggagaatcacttgaacccgggaggtggaggttgcagtgagccaagatggtgctactgtactccagcctggtgacggagcaagactccgtcttaaaaaaaaaaaaggcaagatgtagatgtacttatatagtgtgatctcagctatgtcaaaaagaattttttttaacccttttatcttcctagaacaaggagaaactttggggttttttggtggttttctttagctggtcagattagatgtcatttagattttttattcttttctattttccctgaattttctacaaagagaagtattacttttataatcagaaaaagttgttttgttttttaatagaatttaccacattacaggaatagactatttgaatttcttgtttgatttaccagggttaataatttactctcctacattgttgcatttatttctcaaagacaaaggatatccaattctatatgtcactttagtattacgctttttttgtttttttgtttttttttgaggtagagtttcactctgtcgccaggctggagtgcagtggcacaatctcagctcacttcaatctctgcctcccaggatcaagtgattatcttgcctcagccacctgagtagctgggattataggcgcacgccaccatgtctagctaatttttgtgtttttagtacagatggggtttcaccatgttggccaggatgatctcaatctcctgaccttgtgatccacccaccttggcctccaaaagtgcagggatttagtattatactttttaaaagaaattaaagggtacattttcagccagaatatttcaatagtatttttattttgaatggataaataataagctattgggatttataaatttcatatttgagtaattgttaacaacttgaggatctgttgctgttatttgtatttttttagtgtgtattttttcttcctttttggtcatggtaaaaataaacataaaacttaactgattttaagtgcacaattcagtggcattaagttcatttgcactattgtgctactgttaacaaacatccatccacagaactctttttatcttgcaaagctgaaactctgtacctattacataataactctgggcctggcgtggtggctcacgcctgtaatcccagcactttgggaggctgaggtgggtggatcacctgaggtcaggaatttgagaccagccgggccaacatggtgaaaccccatctctactaataatacaaaaatcagctgggcatggtgtctcatgcctgtaatcccagctattccggaggctgaggcaggagaatcgcttgaacccaggaggtggaggttgcagtgagccaagattgtgccactgcactccagcttgggtgacaagagcgaaagtttgtctcaaaataataataataactctggccaaggtggggctgaaagtcccagtcctctaatcctgccttagtctttcaggtgaccagccttcatcctgtggctatgtaggggccctcggctatttgtcatctctttagcatatgaagacatttttaccactctggagattccaagagtttagggagctgcatgccagggaatggggacaaagaccaaatataggcctgacatagtagctcatgcctataatcccaacaccttgagagactgaggcaggagaatcgcttgagaccagagtttgagaccagtctgggcaacctaggaagatcctgtctgcacacacacacagccacgcacacatgcacacaagtcctgggcaaacctagcaagatcctgtctagacacacacacacacacacacacacaccacacacaccacacacacacacgtttccactttccccaatcccctggcaaccaccattctactttctgtctctatgagtttgactcatagagcactcatgctgtgcaccgattattaggtatttcatataagtggaatcatacaatatttatccttttgtgactggcttatttaatgtagcttaatgtcctcaaggtgccatctgtgttgtagcatgttagaatttccttcctttttaaggctgagtaatatgaataatattccattatatgtgtatctactacattttgcttatccattcatcaatggacatttgtgttgccttcaacttttggctgttgagaataataataatgccatgaacatgcatatgcaaatatctctctgaggcccccttttagttcttatttttgtcaaccccagaattggaatttctggatcatacggtcatcctatttgtaattttctgaggaaccttcacactgttctccatagcagctgtaccattttacatttccaccaatagtgcagggtttcagtttttctgcatccttgccaaaacttgttattttctggattttgtgagactagccatcctaatgggtatgaggtggtatttccctgtaggtttaatttacatttttctaatgatgagtgatgttgagcatcttttttatgtgcttattgggcatttttatgtcttttttggaaaaatattttatttgcctattatttaatggggtggtttggtttttttgttgttgagttgtagaagttctttacatattctggatattaaccttttatcatatacgtgatttacaaatattttctcccattccgcaggttgcctttttactctgttaatggtgtcttttgatgcatagaagtttttctattttgatgtagtccaatttgtctatttttttgttgtcacctatgtttttcatttcatatccaagaaatcaatgccaaatccagtgtcctgaagctttttccctgtattttcttgtaagaattttatatttttagagcttatatttaggcctttaattgactttagtttgtttttataggtggtataagacagcggtctactttcattctttagcatgtggatattcagttttccgagtatcatttgttgaaaagactgacctttctgcattgaatggtcttgccacccttgtcaaaaaacattttactgtatatgtgagagttcatttgtgggctctctctattctatatgtcactctttatgccaataccacactgttatgattaccatagtcttgtaagttttgaaatcaggattataagacttccatacttcattctttacgattgtattttgactttttattaaattcttgtttattgttagcaccctatagattaggctaatttttataggtaagaaagataacagcctttaaatgcagcttaccttcttttcaaggaattcttagcttttaaatttcattttgttgtatggataaataatcctagtctgtcatttcagaatgacaatatcagttgtcattatggttatcaatatggctaccagatatttcattaactccattctcaagattggaaaattatatttggcttagctgtcctggtgtttttgaaacatgaacttgtctatagactgtgtaatagttcagaaagtaaaccatgtatctactgttgaaagtattatgtattttaaaatcttattttttggataccagtcttctggcattcttaagaatggctttggatttggaaaaaataatcagcaaatctttaaaagtgtagatacggtgaaaacagcaaagaagaatccctagaatacctgatatactttatgtggaaaattttaataactgtataagcgaagatgttattaaaaggaatgaagtattcaaatcaaactggtttaaacagtacaaggaatgtattggctctgggaattaaagaaaagtccaagactaggaagggcttcatgcatggttttgtcttggttctccagcttagtttctctgtttccaattcagctttgcctttctctttcctcttggcttcatcagttctaggtctgccacatttgccacaattctataccacctagaagttttctattttttacttagagttttccttcctcagtcaccaaatgaaattcctttatcgattaagccaaatttagaatttttcacctggagtttttcttcttcagtcatcaaatgaaagtccttggctttaattgattgaaccagtttaggtcacatgtccagtcactgtgatcaggaaaatgctgtgcactgattattagtttaaatctggattttcttctcatctctaagctaaacattaggcaaggaggttgggagtacactgagtgggctatttagaactgatacttgaagctggaaagtgggcttatttctacccaaattatatggctgttgtaccatgggaaaagtgatgtagaatagatgttggataggtctgtcatgtctttttattttaaaaagttaagaaagaaaattagcaagacagaagagataaggaaaaagacgcaaaacaagatgggggaactaagtatatccaagattggacagcagtgaggattaaagcagcagtagtggagcagcaaatttgtgacaatacagaagaagctagtgagcaatgaagaaagaaaaaaaatgcagtatccatagtagacactttggtcctaaagctcttgaaggctctatcttcggtatactgtatgggctattgactcatttaaaatgctttcagttccaaataacaggaaacacaactcagagggtctcaaacagttaagaggatttattagctcatacaactaaaaaaatacacagaggtaggtcagccttaaggtctttcataaagaggttgttggtgtcatcaagctttggctttatttctttgcaattctctcttctatgtaccttactaataattaagctcagattgtggtggttccatgtactaattggactagcttagatccttttgttgattttggagacccgaagttagagtctgcttccctagaaccatgtagattccaaaaaaactaaccaagcgttttgagaaagggagaaacagttgtaagactgcaactgtgaatgttaaaataggcaagcagtcctttatttcttaattgtccataaagacattagtttacataaatttactcttcatttgcctagctttcaatatttactgagcacctcctatttgccaggcactattctaggcattaggattacagtgtcatggaatggagctgacattctaatagaaggagacctagaataaacaaagataattgtacataatgataaatgggtttttttgttttttgtttttatttttttacaaaaactggataatgggatagagttgctgggtggagattcagggaaggcctctgaggaagtgaccactggagccagaacctcagtgatgagaaggaaatatgtgcaaagatcaaggtgaaaagcattccggatagaggaaacagcagaggcactgaggtgggaacaatcctggaatgagggaagagtagaaagagaactagaatgtctggagagtagtgaataagtgagagaagatacgagaaaaggagaaagagaggtaggggctaggcatggtaagtaacacagattccttttcttttagacaggcatatcaatgtatatgattctctgatgggcaagttatgtttagtgtaacctttttaagaggtcagagaaatatgcaacatattttagggagatttccattttaaaaattagttaaaatataggaagtttatttctaagctttagtgaacccatttctcctggccagttctttttcacatcacttttcctatgtaataaaagatcggtagaaattctgatatacatgactttgactcatttatgattatagatgtccaaaattacatgcacagaattctcttttgggaacttcaggtaagagacattttacgtcccttaaaagtgtgtcctattttcttgtaggcaacattaaatatcattcacagtgttgttctctcagttcttgacaaaaaccaaaggactagagaattggaagagatttcacaacagaagaatgctgcaaaagataattcactggacacagaggtggcttatttaatccatgaaggcatgtttataagtgatgcattcggtgagggtgagctaacacctatagcagttgacactacctctcaaagaaatgcatctccaaatagtgagccctgcagcagtgattctgtatccgagccagaatgtactactgattcttcatccagcaaagagcacacatcatcatctgctattccaggaggtgtggatattatgtgagtatagtggctactgccaaattgacaagattttgagtcatcttattaatggattcagtaagattgattattcagtttattgaaaaaccatgtaaattttagaatttaacaaaaatatattaattttatgaaacgtatctctataaaaatgtatgagaagtaaggaggtgagcattggaagtaattgaaaattatagagttttaagattgcaaaagaactttaaagaccattttattaaatgccctcatttcagtgataaggtaattgatgcccagagagcttagatgacttgcttacagtgactagtggcagaacatatactggaacccaggtcagtttttgctttggtcatttttctttcttctgtgtcacctttgtgatttatatgttgtgaagatctgtttgatttataacttttggtttttcaaagacatgaatttccaaatggatcacatcttctcttaaaccttattttaaaaacttcttattttgaaataatttcaaatttacagaaaagttaccagaatagaacaaaaaactctcatataaccttcatccagattccccaggtgttaatactttaccacattgcactctgcctccctccctctctttttctctttctgtctccttttgtctttatctcttatgttaatattttttctgaatcctttgacagtaggttacagacatgatgcactattatccctggatacctggtgtatatttcctaaacacaagaacactcctatataaccttagtatactgattaaatacaaggaaacattgatacaataaattattaatattactgtctgatccacagatcccatttaaacaaagtttaccaattgacccagtaatctccgttatcaaaaaaatagaaccaataaaatatttctggtccaagaatagtttggatttagttattgttaagaataacaatatttttattatctttatataaatcaactcagtactttattattacttctttttctgtttttttttttttatactttaagttctgggttacatgtgcagaaagtgcagttttgttacataggtatacatgtgccatggtggtttgctgcacccatcagcccatcacctacattaggtatttctcctaatgttatccctcccctagccctccacccttcacaggccctggtgtgtgatgttcccctccctgtgtccacgtgttctcattgttcagctcccacttatgagtgagaacatgcagtgtttggttttctgatcttgtgatagtttgctgagaatgatggtttccagcttcatccatgtccctgcaaaggacatgaactcatccttttttatggctgcatagtattccacggtgtatatgtgccacattatcttaatccagtctatcattgatgaacctttgggttggttccaagtctttgctattgtgaatagtccccacagtaaacatacgtgtgcatgtgtcttcatcgtagaatcatttataatcctttgggtatatgcccagtaatgggatgtctgggtcaaatggtatttctagttctagatccttgaagaatcgccacactgtcttccacaatggttgaactaattaacactcccaccaacagtgtaaatgcatttctatttctccacatcctctccagcatctgttgtttcctgattttgtagtgatcgccattctaactggagtgagatggtatctcactgtggttttgatttgcatttctctaatgaccagtgatgatgagcattttttcatatgtcttttggccacataaatgtcctcttttgagaagtgtctgttcatatcctttgcccactttttgatggggttgtttgcttttttcttgtaaatttgtttaagttctttgtagattctggatattagccctttgtcagatgagtagattgcaaaaattttctcccattctgtaggttgcctgttcactctgatgatagtttcttttgctgtgcagaagctcttccgtttaattagatcccatttgtcaattttgccttttgttgccattgcttttggtgttttagacatgaagtctttgcccatgcctatgtcctgaatggtattgcccaggttttcttctaggagttttatggtcctaggtcttacgtttaagtctttgatccatcttgagttgatttttgtatatggtgtaaggaaggggtccagtttcagttttctgcatatggctagccagttttcccaacaccatttatcaaatagggaatcttttccccattgcttgtatgtgtcaggtttgtcaaagatcagatggttgtagatgtgtggtattatttctgaggcctctgttctgttccattggtctatatatctgttttggtaccggtatcatgttgttttgattattgtagccttgtagtatagtttgacgtcaggtagcatgatgcctccagctttgttcttcttgcccaggattgtcttggctatgcgggctcttttttggttccattagtagtttttttcatttctgtgaagaaagtcagtggtagcttgatggggatggcattgaatctataaattacttttggcagtaaggccattttcacaatattgattcttcttatccatgagcatggaatgtttttccatttgtttgtgtcctctcttatttccttgagcagtggtttgtagttctccttgaagaggtccttcacatcccttgtaagttggattcctaggtattttattctctttgtagcaattgtgaatgggagttcgctcatgatttggctctctgtttgtctgttattggtgtatagaaatgcttgtgatttttgcacattgattttgtatcctgagactttgctgaagttgcttatcagcttaaggagattttgggctgagatgatggggttttctaaatatacaatcatgtcatctacaaacagagacaatttgacttcctcttttccacattgaataccctttatttttttctcttgcctgattgccctggccagaacttccaatactatattgaataggagtggtgagaaagggcatctgtgtcttgtgccggttttcaaagtgaatgcttccagtttttgcccagtcagtattatattggctgtgggtttgtcataaatagctcttactattttgagatatgttccatcaatacctagtttattgagagtttttagcatgaaaggctgttgaattttttcaaaggccttttctgcatctattgagataatcatgtggtttttgtcattggttctgcttatgtgatggattacatttattgatttatgaatgtcaaaccagccttgcatcccagggatgaagctgacttgatcttggtggataagcttttcgatgtgctgctggattcggtttgccggtattttgttgaggattttctcatcgatgttcatcagggatattggcctaaaattctctttttttgttgtgtctcttccaggctttggtatcaggataatgctggcctcataaaatgagttagggtggattccctctttttctattgattggaatagtttcagaaggaatggtactagctcttcctcgtacctctggtagaattcagctgtgaatctgtctggtcctgaactttttttggttggtaggctattaattattgcctcaatttcagaacctgttactggtctattcagagattcaacttcttcctggtttagtcttgggagggtgcatatgtcgaggaatttatccatttcttctagattttctagtttatttgtgtagaggtgtttgtagtattctctgatggtagtttgtatttctgtggggttggtggtgatatcccctttatcattttttattgtgtctatttgatttttctttctcttcttattagtcttgctagatcaattttgttgatcttttcaaaaaaccagctcctggattcattgatttttttttttttgaagggttttttatgtctctgtgtccttcagttctgctctgatcttagttatttcttgccttctgctagcttttgaatgtgtttgctcttgcttctctagttcttttaattgtgatgttagggtgttgattttagatctctcctgctttctcttgtgggcatttactgctataaatttccctctacacactgctttaaatgtgtcccagagattctggtacgttgtgtctttgttctcattggtttcaaagaacatctttgtttctgccttcattttgttatttacccagtagtcattcaggagcaggttgttcagtttccatgtagttgagtggttttgattgagattcttaatcctgagttctaatttgattgcagtgtggtctgagagacagtttgttgtgatttctgttcttttacatttgctgaggagtgctttagttcgagttatgtggtcaattttagaataagtgtgatgtggtgctgagaagaatgtatattctgttgatttggggtggagagttctgcagatgtctattaggtccgtttggtccagagctgagttcaagtcctggatatccttgttaattttctgtcgtgttgatctaatattgacagtggggtattaacgtctcccattattattgtgtgggagtgtaagtctctttgtaggtctctaaggacttgctttatgaatctgggtgctcctgtattggttgtatatatatttaggatagttagttcttcttgttgaattgatccctttaccattatataatggtcttctttgtgtcttttgatttttgttggtttaaagtctgtttcgtcagagaccaagattgcaacccctgctttttttttttttttttgctttccatttgcttggtagatcttcctccatccctttattttgagcctatgtgtgtctttgcatgtgagatgggtctcctgaatgtagcacaccgatgggtcttgactctttatccagtttgccagtctgtgtcttttaattggggcatttagcccatttacatttaaggttaatattgttatgtgtgaatttgatcctgtcattatgatgctagctggttatttcgcccactaattgatgcagtttcttcctagcattgatggtctttacaatttggcctgtttttgcagtgtctggtaccagttgttcctttccatgtttagtgcttccttcaggagctcttgtaaggcaggcctggtggtgacaaaaatctctcagcatttgcttgtctgtaaaggcttttatttctccttcacttatgaagcttagtttggctggatatgaaattctgggttgaaaattctttaagaatgttgaatcttggcccccactctcttctggcttctaggatttctgcagagacatccgctgttagtctgatgggcttccctttgtgggtaacctgacctttctctctggctgcccttaacattttttccttcatttcacccttggtgaatccgacaattatgtgtcttggggttgttcttctcaagaagtatctttgtggtgttctctgtatttcctgaatgtgaatgttggcctgccttgctaggttggggaagttctgctggatagtatcctgaagagtgttttctaacttggttccactcttcccatcactttcaggtacaccaatcaaacgtagatttggtcttttcacatagtcccatatttcttggaggctttattcatttcttttcactcttttttctctaatcttgtcttctcgctttatttcactaatttgatcttcagtcactgataccctttcttccacttgattgaatcggctattgaagcttgtgtatgcttcacaaagttcttgtactgtggttctcagctccatcaggtcatttaagcttttctctagactggttattctagttagccactcatctaatcttctttcaaggtttttagctcccttgcaatgggctagaacatgctcctttagctcagagaagtttgttattaccgaccttctgaagcctacttccgtcagctcgtctaactcattctccgtccagttttgttcccttgctggtgaggatttgtgttcctttggaggagaagaggtattctggcttttggagtcttcagcatttctactctggtttctccccatctttttggttttacctacctttggtctttgatgttggtgacctgtcgatgggattttggtgtggatgttctttttgttgatgttgatgctattcctttgtttgttaattttccttccaacagtcacatccctcaactgcaggtgtgttggagtttgctggaggtccactccagaccctgtttgtctgggtatcaccagcagaggctgcagaacagcaaatattgctgcctgatccttcccttgcaagcttcacagaggggcacccacctgtatgaggtgtctgtcggccccctactgggaggtgtctcccagtcaggctgcacgggggtcagggatccacttgaggaggcagtctgtccgttatcagagctcgaacactgtgctgggagaaccacagctctcttcagagctctcaggcagggatgtttaagtctggagaagctgtctgctgccttttgttcagctgtgccctccccagggaggtggaatccagagaggcagtaggcattgctgagctgcggtgtgctctgcccagtttgagcttccctgctgctttgtttacactctgagcatagaactgcctactcaagcctcagcaatggcagacgcctctccccccaccaagctctcacatcccaggtggatctcagactcctgtgctaccagtgagcaaggctccgtgggtgtgggacccaccgagccaggcacgggaggggatctcctggtctgcctgttgcaaagaccataggaaaagcacagtatttgggcaggagtgtaccacttctccaggtgcagttactcacagcttcccttggctaggaaagggaaatcccccgaccccttgtgcttcccaggtgaggcgatgccccgccctgcttcagcgcaccctccatgggctgcacccactgtccatccagtcccaatgagatgaaccaggtacctcagttggaaatgcagagatcacccgtcttctgcgtcgatctcgctgggagctgtagacaagagctgttcctattcagccatcttgggagcgaccggtcagctcagtactttatgtaaatcaacttatggtcctggagcttataaaggtcacagttacagcataaagtcagctataacactgctcttcagtacaaacaaaccaaaccctgagctatatattaataaagtttcttctgtgttcaggctgatattttcacatttactagttagggtgcagtctaaaactgctataaaaagagatgtaaaaactctgtagcttaaacaatgtaaaattttatttctctcatgtaacatttcagaggtaggagatggtcagctgagaagacagttctaccattctcatgtgtagttttcatctgtgtctaaggtggctgttctggcttttagcatttcattttcatccgtagcagcaggaaggagaggacaaagggctgataccttgcttactttgttttgcttgttaaacattttaacaacagccatgtaatttgggtagaactaagcccaccttccatcttcaagtatcatttgtattcatcttcctctcagcccttttatgatccatttggaacataaggcacatatgggaaaatgtagcaattataaagtgctcagctcaattaactagcacaaagtgaatgtgttggtgtaattgtcacccccctcaagaactataactttaccagctcttcagaagcccctcttgctgctgtaatactacactactccttcccataggaaaccattaaaacaattggtttttccagtttttaaactttatgttaatggaataatatatttgctcttttgtctctgatttctttcgttcagcattacagttgtgatatctatccaggttgttacatgtagcagtgattttattttttgtgtacaaataatccattttatgatacaccacaatgtatgtatgtattttacttttgataagatttgggttattttcattttggattgtcacgaacattcttctagatacctttgttgcacatgttacaagcattgctgttgaatatatacctggaaacaaagtatgtgaatggtcaatttagctaatgcctaacaatttctcaaagtggttgtactcatttatgctcccctcagaagtgtggagcagtttgtgtcactccacatcttccttcactcttaatattgccagtcttttacatgttagccattctgttgggtatgttgcaagtgtagtaattttatttccctgatgattgttaggagagcaccttttcatacattcattggcttctgggatgtccttttctatgaagtgcctattcaaggcctttacccatttttctgttggtttgtcttgatctgtgaaggttgtttatattatgtcagcacaaaccttttgccagttgtccatattgcagatatcttctcccactttctgtattgacttttcactcttattgggttttttggtgaacaaaagttcttaatataattctatgattcattactttcctttatgatttatgcttctttgtgtcctgtttaagaaatctttctctaccttaaagacttgaagatgttttctggttactgtctagaaactttgttactgtctttttcacattaagacctacaatccatctagaattgatttttatgtttagtatgagggttaagatttttttcccatatggatatgtttttgaccttgcaccatttattgaaaaggctgtctttcctactgctctataatgtcactcttgacataaatcaaatattcagataggcgtatctgtttctggactctatttcgttcatttttctgtctttacaccagtaccattaagtaaaattgtcatagttactgtagttacgatagcttttgttttcttaaacaattagtttgtagagatggggtcttactatgttgcccaggctggtcactcctggcctcaagtgatcctcctgtctcaacctcccagagtgctaggcgtgaaccaccatgcccagcaactgtagctttttaatccatattaatatctgggagattaatttctcccaatttttcttctttaggattgcctcaactcttcttggtcttttacaaatccatatacattttagatttcttagttctctgttaccttcatgtagatttgtttatattttattctttctttttaaaaacaagcacaatccagaattcacacttattacttccactcacatcctagtggccagaataattacatgactatgtctagctataagggaagcttgagaaataagtctttagcttgtggactatttgcccagctagagctgtcattgtggcaaaagagagaacagatactgaaagatagttagctttctgccacaccatttgagatccttttaaactggatgcagtctcacagtttttatccttcccctcctacctccattgtggctcactttatacattgaaccttctctggctttccccaattgcatcctcctacagcatgaagcataggttctgtagatggttctttctatgttcagtagacacataaatgtctgggaactacccaacccaaaggggcaatgaattgagtatacttatatgtgtgagtctaactagttctttcatacaacggctctgactattcctgtagcaagtgtttttgtggtatataattgaatcactgatatagaacatgcaaaaatacgtctgacgttctaactttgttagtggtagattttccctattttcttacttcaaaataacctgcaattttgtaagtttattgcaatgcaaataaggcacagaataggaaatacttttctaggcaggaaataggaagagaaaaacaatggaaaatattagagttgcagagcataatgtcctcaagtttcatccatgttgaagcatatatcaaaattttcttcctttttaaggctgaataatattccattcacatgtatgtgatatatacatacaagatgtatatgtatatatcacattttgtttatctgttcatccattagtggacacttgggttgcttccacgtcttggctattttgaatagtgctgttatgaacttgagtgtacatataaatcctagagatcttactttgttattttggatatatacccagaagtagaattgctggattatgtttgaattcgtttgttttttccctattgacgtgaaagttagagatctaactgaagttaaaaaataatttttttttctttttttttttcctcactcctttgcccaggctggagtgcagtggtgcgatctcggctcactgcaagctctgcctaccgggttcacaccattctcctgcctcagcctcccaagtagctgggactacaggcgcctgccaccacgcctggctaatttttttgcgtttttagtagagacggggtttcaccatgtgttagccaggatgatctcggtctcctgacctcatgatctgcccgcctcggccttccaaagtgctgggattacaggcgtgagccaccgcgccccagccccaaaaaatctttttaagagcagaattacaatgaatgaaattattttaaaaaactaactttgggctttttggattaattcactctttttttttttttaaggacttgagttgtttttatttgctattttctgtttatatttttgtgaattggtaggatattgccaagagtttcaaattccttaatcattctgttacatgggggaaattttaagtaatgtttcaggaattaaaaatttacttcagtagtaaagttgactttgaaatttaagcaagaattttgcaggtatcctgttttgaaatactactagactgtttatatagaaatgtcggagcagaggaagcttaatcgattagaagtagactaagtctaggttctagttctactctcttaatattctaaccttggataggtcactttaactttctaagattcagtgttctcctccataggtggttatttatctacctacctcagagtgtgagaatgaaacgagataatgtttctgcgagtactttaagaatattaattcttctgttattttgaagcattagtaaacaaatttggtgatattatgattttgaaggatagcaggtaataaccttctttaataccataaccaattagaatggtagtttgcctcaaagtaatatacaccagagcctctttgtagtatctttgaaaagtattttaattcaactgaaagagagaaaaatgaggttaaggtacttcacttggctcatggtaacactaaactgaactgatggcatggaatcattggtctttatatatgcccctgggggaaaatgtttaaaaatagaaagttttacattccccctcaaaattgaaaaaaagcacattatgtcttataaatactcctctttgagtttaggttccttgaaagcagcaacctattatattccctctagtgcctagcgcttaagcatggtaaatgcttagtaaatattagttcagttgaactgaatatttatactcattcataattataagtaaaaagagagcctgtttgtcatgaaataacattccttccctcttcttgcttccactgtatcatcctaggtgcctatgcacaactgtcccctgacatagctactaccttgtacctaatctaaaaatttaattttgctatagtttctgcagactttccaattggagtctgaaccaagtgttgaaaatactacagtggagaatgaaaattcttatttaaggttatgacaaaatacatttgtggatgggcacagtggctcacacttgtaaatcctagcactttgggaggctgaggtgggaggattgcttgaggccagggatatttgagaccaccctgggcattgtagcaagactctgtagtcccagctacttgggaggctgaggtagggggtttgcttgaggctaggagtttgaggtttcagtaagctctgaatgtgccactgcactccagcctgggtgacagagcaagaccctgtctcaaaacaaataataatatagataatagttgtattatctgagcatgtttaagtaatgtttcactataaaaactataagatatttggtacatcatagaatttttcttcaaatgtgaattttacagctttttcatcctttttattgataggtcacctgtggagaatactatgtttacaactttccctgactaaatcttattttgttattttcagggtcagtgaagatatgaaattaactgactcagagctaggaaagctggcaaataatatccaggaattattatatagtgcctcagatatatgccatgatcgagctgtcaaatttctcatgtcaagagcaaaggtagctattttcataaagctttatatattttatacgtaataattttgaagatctggaattatgtctttgcttcctgtgttccccataatgcatattatatttttaacatttaataaagtcagtgttaccactgatgtggtctactagggagatgttgagatatgaagtaatctaaaataaataggagttattaaagcattattttcagataaatgattaaatgacattttgaaatatatgttaataactaatttgaaattaatgttgttttacatatatagtaagtctatatatgtatacctaaatatatgtagttaaacaagtttataataaaactccaacattgtgaaaattttatagtatgacctaaattcatttgaactactatattagttataaagggatcagaatcaaatttggacctcttaagcatttcatgctcaatttctgggtctgaagtattgggaaatattattaaaataaaaaatatatagattataataatcgttaaactaacttggtttcataactcaatttggtgttacactaactctcatgatttttgtattaaaatttaggatggttttcttgagaagctaaattccatggaattcataacactttctagattaatggaaacattcattttagacaccgaacagatctgtggaagaaaaagcacgtcattacttggagcacttcagagccaagctattaagtttgtaaataggtttcatgaagagagaaaaaccaagctcaggtatcatcaccatgtccattctgttgtttgattttttcatttttctttgtgaaacacagttatgtttaaaagaggaaacctaattggccagtgaaaatgcctgataaaggtttttttaattaaaggcagattgtggaattaaaatcacatttcttggcttttcaaagtggagttagaatgtttacttctattaaagtacttatcaggaagatcctcagtaagttgacttttgttcccactcaaagttaagtaaattgtttcatcattctttttgattaggctgagatataaaaagggaactattttctaagtattggtcctgcttattaaagtgttcagcactttttaagtcttatgttctcactcagctcttcttccttttcttttaaaccaaggaagatggtattgaaatgttaaagtttaccttcttttctccttactgtggactagcctcctcttagacaatgagcgctggaagcaagcagatgttcctgcagaatttcaggatcttgttgattctctgtcagatgggaagattgctttacctgaaaaaaaatcaggaggtatgtgtattcattcacacattctctttcaattttatattgtttatttattttgtattaatgcttaatatttctttagttgacaatgcctatttcaaagctagaaccaatatttccagcttagtaaatacttgacaggaaaactatggtaatttataataattatttcaaatatttattgcgtgttataaccatatgccagacactggaccatgttctttacatgcattactccagttcattctcacaacgatctgtgatacaggtactattgtttctttgtgtaacagtgaggaggcttgaggcttagaagggttaaggaatttttatacaaatgatgagttgggatttgaaaccagctttatataatttcatagctatgttcttagctactataccgtattgtttacatacatgaattgagtaagcgctagttagcttctactttgtgtcctatattgagacagaattgagacagagataacagctgtatttctgctttaaagaggctaagtctaatgaacaaaaccaaaaaatacataagcaatcacaagtaatgtagttacatgatagcgaaaatccaaacgtaaagaaagaaaaccatgaaggagacaaaaaaggaagaaccagagaggcagggagaaatctagaacatagaagtaaaatgatgagagagttttcatgtggaagagatggctgggaaatatttttgtaccctagttcaggtggagtcatcatgtgataataatgtaaatttatttataatagtcctataagatttacaattatgaaattcttgagtatttctaatagagaaggtagttgaactatttcagattttatgcatttaatcaaagttttaaattgtatacttcacattcgcacaaaatgcaactagactacaagagaaagacttgagtaaaacaccaacagtaaccattagtttgatacatagatcatttgcaatctcagtaattcagtggagtgatagtcaaattgcagttcagtgcttagtaactggaaaagtgaggaagggtagacaagtatagcctactttttcaacagatttggcatgcaggaaaagtgagtgatgaaatagtagctaaagaagttagagagagagggtgatttacagggcaaggtgcatggaatcgaatctagagtttaagagaaaggctactacttctgcccctgtgacaaggggaagagggttaaggacaagtataaaatagatgagttgatatagggcagagaaaaattgaaggaattaagtaaatttttgtcatatgacagtttttaataggtaatagtgttgggtggtagagttttctacttgatggtatgatattggcacaactaaagcattcaagtagcaagagctgatggaaaaataaaactctgaccactccaaatcactagtttaaaattataagacttatcactcatctagtctttcaagctatatttaattgacttccctctatgtgaggtgctgtgctagatgactaggatatgttttctgtccctgaacagctcatggtcttttgattccactgttaagcaaacagaatgatttctgaattaaaatcataaatgtggaataattgaattactcatgtgttttgtttgaaacatgaactacttattttcacttctttggaggatattgatggtaggaggtttcttttacataccttgcttcatctcagtctttgttttcctctctgaatagcataggtgtatgctattagaagtccattaacattttactagttcttttcaagttaaggatcctggattattacccatttatccatgataaattaattgggttactatccactcagctaggcattggggaaatgaagattaatggatagcagctaatattaattgagtgtttacttacactgttttgttctaagtattttacatgtgttatctcatttacaggtccatgagctagatattattagtattcctattttacaaatttagaaactaaggcacaaagaggttaagcaacttgtctaaggttacatagctaggaagtggtagagctgggattccaatccaggcagactgactttagggccatttctcttttctacgatgctatgccacttctctgtaatatagagaagtgatgaagacacagtccttaacctcaaaaaatatacttctgacatacatagtaaattgtgattgcaatatatatagctctcaaatagtcaaatatatttacaaatcctaaagggatttgaagcttagggaagcataatgagctgcccatggtaatctaatcaatttggcgtgtccaggataaaatccagtccactgttcttttcacctcaatatgctgaattttgtttaaagaaatatcacatgctgaaaataaagtaacgtctgggttgaagtattaaaaattaaatatataatctttccatcaaatttagaaattaacttgtattctataatgataatagtaaagacaaccaatttaaatgctagttctgcctttccaaaactaataactttttaaaaaactatttgctgatcatttaccttgtgccagccctaagggataggcagtttgtgataattatttctaccattaacaacaaccctgaaagatattgttgttcacatttaatagatacagatagtgatactcaaagaggttaaataattgccccaaagtcatgtatccagtaattggtagtactggtactcaaatccaaatctctccaacttccagtatactttatttactgtgtgccaaatagtttcccaggaagtagatgtttattttcagaaatgagagtttttggccttaaacaggaattatcttcttcagctttttctctattttgtttcgtctggtactcttgtctctcgtttatttgcttaactctgtagccacagaagaaaggaaaccagctgaagttcttattgtcgagggacaacagtatgcagttgttgggtgagtgacacatttttctttagtagttgagtcaactatttaaaacacaagtcttctagttctcccttgaagtgaattggaaattttggattaacagttttaacagtgttaaatttggattaactgttttaaatcctgcaaagaacttaaaggaaactttatggatttctttatcttctctcttctgtagcatacattattaaggactgcactggcttaacacaaaaagcttgatttttctcatataacaagaaatctagacaacccaagagtaattgtagtggatccatgatattattgctatcccaggctctttctatcttttcttctgttgctttcttagaatgtattatagcataatagtttaagttgtgaactctggaacccacacaatgtggaaaatagtactatacacagaattattgcgaaaattaagtaattcatgtaaagcatttagcacaggtctagcacctaataagttgatagttgttggtagttattctcattggcatcatttgattcactagatcttttaccaataaaagtatctcaaattcaagttaactaagaagcatacaaattccatctttttttgtctagtactatgtcttttattaaattggtaattaaaatatatcttcatatgctttaacagtacttcacagcttaagtgttttcatatatatgtgatctcatttgatctttacaactacattgtaaaataaagatattggggattattctttcctttttccactatgagaattgaagcttagaagattaagtggttcaagtgacccaaatggagccagaattcaaatctaggtctaactgccaatatctagcccagcattctttttcacttttcttcttgtcaagtgttttttgaaatgaccaccacctccaggaagaatgtaattctatgttcctcaatcatggcacttaccgtagtataatagaattgtttatttatgtatatgtcttctaatttgactctgaattcctcaaaggtagagatgaggtcttaccgtttttatttttcttggcaccataataagcactcaaaaagtatgtatagaattaatcctttttctgtatctgtattcaaatacctgaagtccacacattctaaactaaagcctccattcttttctcttctgaagtccttccctgtttctggtagggaaagctttcttcagtcttcctgtaatcccatcccttcaatataattatgatttccctccttaactactggttatctggtcactcttcacttgcttgatggatatggtcccctctggccatcttgcttttggctctttaggcagagagtctgttgccaaaaaactaaattccctggctaaaggggaactattacaacttctgagagacaattacaaaagataagcaatggactcatgctcatttaggcagactctaggagaaataagcatagagaccagtatgcatatatggtctgacaaggtgttataaaggctagacaccatctttcttgaatcattagttcctgatatctttcaggctcttataaatccttattttacgtagatcttatttctgagcatgtcattgaacttagatatcctatgatgaatggctttctccttaatttcaatcttctttaacttcccagtagtgtgtctttttaacgtgtgatttgtccttctatggaggtgataactttatcatcttcggaaaactttttttttttttttttttttttttttgagacggagctttgctcttgttgcccaggctggagtgccatggcatgatctcagctcaccacaacctccggctcccaggttcaaacgattctcctgcctcagcctccccagtagctgggattacagatgtgcagcaccacgcccagctaattttgaatttttaatagagacagggtttctccactgtcaggctggtcttctccattgtcaggctggtctcgaactcccgacctccagtgatctgcctgccttgacctcccaaagtgctgggattacaggtgtgagccaccgcgcccagccagagaaccttttgtgacctaccaataaaattcttaggagacatgttttccttagaagccattatagattttttttttttccatctcactaagaaaatctggactaggttttcttcatcaattcattagttatgatggaggacctactatgttggtaatcagaaacactggataggctttttgtcagtgtttctgaattggctaatgaatgcaatacctgtcttactgaagcgactcccttacttaataagaatgccatacagagagtattatgcctgttgtacagaatttaaggagccactcattctcagtgttgtgcaagctgatcctgcaattgcacagagtaagagcctctttaaattttgcattctagacacctctcttgtcttgtgttagtcaagaacctgctgtactagtaggtaaaatgcatactttaacatagttaccaaggtcattatattctcagagatcctttgtgccattaagtaatttgatttttatatgccaaatccttttgatttttcttgttttgatttcctattgggccatttttcttttcttgtagaaccgtattgctgttaataagaattatccttgaatattgccagtgtgtggataacatcccatctgttactactgacatgcttactcgtctgtcagatttattgaaggtatgtatgacttcactccattatggaaaaatttttcgaggaattaatacattagggtgtgactaatcttaactcaaagacatttcaaggtcaaattaactttaagacattagttttataacatttgattgtggttgaatcacaacatgttattggaaacaggctgcctgcttccttcttactccacagttagtgatcctcattcacccatagagttgttaatgacattggagacaggagatgatttgttcgttaggtgctgaacatgactgaggccacttaggtcaaaaaacctggactggcttcaaatgtgcatggaaggaattcactgaactttacaaaattcatctcactaaggttagagatttttcttgcatcattctttcagaaccattgatataaaatgaaaatgtgatgattttattcagccatttcatattgagatattttaaactaccagtacggaggaaatgctttattatttttttcaaacctctaatctgttaattatgttctgacttgagttgtcatgttttagccaagacagatttttataacttttgaaaataggacttcccaacaagaatgactgaaaccgaatttgttttgtacatgcaaattaaagattaatttctgcgaactgatttttagaatttttcaacttttttcttatcagtaaatattatcatttagaatctccccttctcatttctttttcattaaataaatagatactaattgcttctactagataattcatttggccattgaatgagaggaaaggggaatgtatttttataatagcacattgccaggatataaagaacagtttttagtaaattttggggtttttttctccttcttttgttagtacttcaattcaagaagttgccagttagttcttggagctggtgcactgcaagttgttggactaaaaacgataactacaaaaaatttgggtatggattcttgcgtttaattcacttgctgaagtgttaacagtgatgtcactgttctcatcatgtttttttatacctcatgttttcatggctctaaccaaagtggcattactctaaaaataaatgctacttactcttttatgtatactcatcactgaaaaaaactaaccatggggaaaaggttacgatgcatttcccctccaagtataagttacttggaagttacaccactctagaaaatattaagatataatgtgtataaagtatttgggggtgaaagctatctgaatgtcataagagaatcagttgtcttgttattgtgatactgataatactcacaacttgagtcctttgtgaaagcagcatgttcattacattattcagtatcaaattattagacaaaatgaaatatgttgccttctgccatagggctcttcgtttatgaaataaactggttctttataagtgatgttttttatttgatttgatttgtaattaaaatcaactaataccttttttttttttatttctccattatatatctactccctggatcttcagctctttcttcacgatgtttgcagttaattgtgcactacattcctgtgatccgggctcattttgaagctcgactaccacctaagcaatatagcatgcttaggcattttgatcatatcactaaggtactttttcatatattttctattggcgtttcataagtttagatccttaattgttaagtattttaaaaatgtgtcccagggacttaaaaatacaattatcatttctcattgcaggactaccatgatcacatagctgaaatatcagctaagcttgtagcgataatggatagcttatttgacaagctgttatctaaggtaatgatttatagaaattattagactttgttcaaagacattatgattttctattttataaggagtactttataaattaagatgtgaaaagataatctaaactttcataggatatttaccaattagtagaattttaaattttttttcaggaaaatgtgaccatgtgctgtgaccaagaccccccatagtggtctaacctgcagttatctaacaaattattcagggtttagaaaacaactcaacaaaattttcggatttccaaaacagttgatattctaaggggctggcaggagtaggagagatgattctaaggatggtagaaatcctatgcagaagtatttttatgttaattcatttcaacattcatttcttgtttgtttttcattcccaatatgtcattaaatgaagcagtgttccccaaagaattcgcagttatactgggagagtatcttcagaaaaatatcatttagtcagccccaatcacgcttgatctatctttcactgtttactttccctaagtttttcaattcacgtcttagtgggaaagccaaaatttcgtaacttgaaagtctgaaagtttactcagtgtatactgtctgtccaagatcatatttggaataaccttaatagcaaagaactttgatttgctttttatcctacttgcatccttcagattccgaaatggcaggaacagcaggtacataagaatcaaaagggcaagataaagtggtgtccattcactcacacacaagactacccaaacacatattctattagccttcagaataatgatatcacaagtcatctaaaaatccccactgttcaatcatgagagaatgagagtaaaatagataaatagcatcttattaataatattattatgaaagcggcttttacttcccagattcctggaaagggtctctgacttctgggaatccccagactacactacacctctggtgtagttggtaatacaggtgttttatgcttcacttttaagaagcttaaggaatttgtatttatgtacaaacatacctatactatgttatgcctatttaaattagtttctagttgtgaagggagaaaaattactgtttagagatgctttattttcttcactggtgccaagtacaagctacattcaaaagcaattctattctaccagtttcctttttgatatacagcattcttctgtgtaccaaaagtcggtaacatattgtgtctgctctcaagaagcttaccatctaacaaggttagaagactgtaaacagctaacagtggagaatagaatatatgttaaatagtggaactaggctgggaatagtggaactatgcttgagtccaggagttccagcctgcagtgagctgtgatcaccccactgcactccagtctaggtgacagagcaagacccggtctctaaaacaaacaaacaaaaatagtggaacaattaataggctgtggaatacaatgaagaaaaaccaaagatgtgctagtactcttaaaactctgactttagtctgtcactttggtcatccacagagtttttgaataagaattgtcacagtgactagactttttcctatgacaacttactttttttttctgtaaagaaaaaagagaattgtttaattaacttcccatgtatgcatgacctatattcgttattaacaatttgccttttttgctaaaatattttataataaatttgaggcattatggtattttatccctaaatacctaagtatgcatttttaaaaactaagaacatttttacataaccacactattatcacacctaacaaaattgataattcctcaaaatcatctaatatttattctcctatttgaaacttattaattgtcccaaaaatgtctttttataataatttgtttggacaaaggcttctacacggttcacagattgcatttggttattacgtctcttaagtcttataaactagaacacgcccctcctcatttaaaaaaatatatatcattgacccgttgaagaatatggccaggcttttataacataatgttctctctagtatcttctccattgatgacttttcctattactctggcatattacattcttcctgtgttaacaagtctctctttgccactccctattctgtttgctttcatgtgttgctcaggagtttgaccctgtttttaattaatatcaaaatagcagacagtgtttggtttgggtttgcctttcagtttttaacctttcatgttctaatctgaaaatataattttaggaaaggatgacacaataacatatgggttgattctaagaagctaataagtggccaggcacggtggctcaagcctgtaatcccagcacttttgggaggctgaggcaggtggatcacctgaggtcaggagttcaagaccagcttggccaatatggtgaaaccctgtctctaccaaaaatacaaaaaaattagccaggcgtggtggtgggcacctgtaatcccagctactcgggaggctgaggcaggagagttgcttgaactcaggaagcagaggttgcagtgagccgagatggcaccattgcactccagcctaggcaacaagagtgaaactctgtctcaaaaaaaaaaaaaaaaccaaaaacggccaggcgaggtcgcttacgtctataatcccagcactttgggaggccgaggtgggtggatcgtgaggtcaggagttcaagaccagcctggccaagatggttaaaccctgtctctactaaaaatacaaaaattagccgggcatggtagtgggtgcttgtaatcccagctacccggaggctatggcagagaattgcttgaacccacgaggcggaggttgcagtgagccaagatcacgccactgcactccagcctaggtgacagagtgagactccatctcaaaaaaaaaaaaaaaaaaaaaaaaaaggcagctaataagtaagggtaccattgcctgggtaggatgaaacaatatctaattgtactaacagctagactaatgttccaaccaccattcatttattcattcattctgtaagttatgtattaatataaactgttttgttcagtatcagggatacacaagggtgaataagcctttgatcttgtcctccaatagcaaaatatttgtcagggaagtacatcaataactatgacaggatgtaggatatatgtaaagtgttacaaataaggagctaatttagtgctggagcttttaaggctttggaagagatggtgtcagctggtgaaggagatctgggaaagttttatgaatgaggcatgcatgtaaattttgcttttaaggatagataagatgagggcaaatgaagttgaggagaacagatctctgagataacagcataagcaaacatgttggtagaaattttaaggcaattcattgtcagggttttggagtcaggtagacctaaattcaaatcccatgtctgtcacatactagctattgaaggaccttgggcaaattattaatctccttaagcctcagtttctgcctctaaagaggataatagtggagcctacttcatacagttgtattaatgagataatatatgtggattgctttccttttatcatgtatctgactatagcaagttctagtaaatattgactgctaatgcttttgctgttgctgttactaataataaaggtaatagttccatttggctaatgcatcagagtgggcacacatgagtgggagatatggtggaaagataatagagcgctgtgactaccagtagaaaactaagcaattcatatcaggtttattgaggtataatttacagtcagtaaaattcaccttttctaagtgtatgtatactatctgtatctaaatacagatagtataactgcaagttatagaacatcattggtaagcattctcttgggcacttttgtagtcagttcactccccatactcagcctctgaaagctactgatctgatatttgtccatgtagttttgccttttccagaatatcctctaagtagaattatacagaatgtagtctactgtgccacacttcatttaacataatgtttttggagttcatggatgttacagcatgtgtcagtggtttgttccgttttattatagagtagtattcattgtatggattcactgctatttgtttatccattcaccaattgatagacatttgaattttctccagtttttggctgttatgaagaaagctgttataagcttacatgtacagtctttgtgtaggtatgtgtttacatttctttagtataaataccttggaataagattggcaattgtggattatggaaatataaaattttatggtaactttataagaaactgcaaaatttttctaaaattttctaaaacgcatcattttgcctttttacttgccatgtagaagagttccaggtgctcttcaccatcactttattttttaatgttcgtcctcttgtaggtgtgtatggagtgatactcattgtggttttaagttacataattacagatatgttaagcatcttttcatgtgcttgtttgccattcatatctttggtaaagtgtctgctcagatttcttgctcatttaaaaatattaggttgtttgtcttataagtgttccttatatatcttagatacaaattctgtatcagtatgtggtttctaagtattttctcccagtttgtggcttgtcttctcctttcatgaacagtgtcttagagcaatttttgattttgatgaaattcagtttatttatttattttctgttcatgctgcttgtgtcctatcctgagaaatcttttcttttcttttttttttttttttgagatggagtttctctcttgttgcccaggctggagtgcaatggcgcgatctcagctcaccgcaacctccgcctcccgggttcatgctattcttctgcctcagcctcttgagtaactgggattacgggcatgcaccaccacgcccagctaattttatatttttaatagagacgaggtttctccatgttggtcaggctggtctcaaactcccgacctcaggtgatctgcccacctcggcctcccaaagtgctgggattacaggcatgagccactgcgtccggccaagaaatctttgtataacccaagttacaaagatattctccaattttttttctagaatgttattgttttaggttttatatttaaggctatgattcatttctagttgatatttatatataatgcaaagtataagtcagtgttcatttttcatagttccagcaccttttgttaaaaagactatcatttctccactggcacctttgttaaaaatcaactgtttttgtttggttttgagattatattctgttccagtaccacactgtcttagctactccagcattattgtaaatcttgaaataagataatgtgagctcactaattttgttctttttcaaaattgttttggctattctaggtccttagcttttccctataaaattttatatcagcttatcaaatactaccaaaaaggctgctcagattttgattgaaattgcgttgaatgtatagatcagttggggtgaaattgacattattgggtctcctgatccacaaacaaggtatatccagttttgtaccagagccagattgcacctgctagccagaaactatgttgtgtatctcttcccaatactacattcagtaacagcacactggtaactttgccagtggtgtgaatatttacaccatggaaattaacaaatactacaaaccagtgcttttcccccagtgagcccattaaatgtttaccacacaccactggacctatctctttactccttacatctttaatttctttgatcaaaattttgtatttttcagtaaacagataatgcacacattttataagtatttcttcatttttgatgctattgtacatggtatctttttttaagatttacgtttccaattattcaatgctaatatattgaaacaccttggatttttctatattaactttgtgtcctgcatccttgctaaactcacatattagttacaatgccaattttgtagattctttgggatttttctgcatacacactcatgttgtctgcaaatagaatcttgcatctttttcaatctgtataccttttatttcttttccttgctttatggcactggctaggactttcagcacaacgttgaataaaattggtgaaaacagatatgcttggtttctccagtcttgggacaaaatgttcagtctttaaccattaagtatgatgttagctgtaggttttttttaagaggcctttatcaggttaaggaagattctttctgttcaagtttgctaagaggtttatatgatgaacagatgttgaattttgtcaaatactttttgtgcatctgttgagatgatcatatggtctgcatttcttagtctgaagaaattaatttctaaatttctaaatattttaggattgcctttaggattgccaaggtgaattaccttcattgattttttaaggttgagccaaccttgcattcataggataaacctacttaaggatttttttgtgtggtggaggggtattatgaaggatattggtctatagggttatttgttttgttttgaagtgcctatttgattttggtatcagagtaatactggactcataaaatgagttggacagtattcttcctcctatatttcctggaagaagaatttgtggggagttggtattattttttccccaagttttaggttagaatttacccgtaaagccatttggtctttgttcttactttacaggcaggtttttaataagttcattaaaaaaaaaatacatatagaactatgtgggtaatctacttgagtacactttggaagtttgtttctttgaatggatttatctatttcatctgttattaacttggaagcattaacttgtatatgatattcttttattcttttaatgtcagtgaggatctgtattatctgctgtttctttcatgatattggtaatgatgttaatttataaagtcttcctcacctccccctttctggctagaagtttatcacatgttttgatcttttagtaaaagtaaatatttcctgctctttttctgctttttattttcctgctccagtctgtgttatttattttctattttcttttaacttgctttggatttaatttgctgttttctaatttctcaaggtagaagcccagatttttgatttgagacctttcttttccttttttgaatataagcatttgataatctgtgttttcctttatgtactgcttttgctgtgtcctgcaaattttgatactttgtgcttttatttttatttatttcaaaatattttctaattgctcttgtgattcttctttggccttgggttatttggaaatctgttacttaatttctaaatattctaggatttttccagcaatctttgttttgatctcaagtctaattctgttttggtcagcaaacagactttatgtgactccagttattttatgtctaagatttcttttgtggcccagaatgtggccaaagaatatcttggctaatgttccacatgcacatgaaaacaatgtgtattttgctgttgctgggtagagtgtcctgtgtatatcaactaagtggtgttggttggtagtgttatttaggtcttttctgtccttactgattttctgtctacttcttatatcaattactgagagatgagcactgaagttttttactgtaattgtaaatttgtctgtttttgtgttcagatctttgcaagtttttgttatatgtatcttgaagttctattgctggatacatgcacatttaggattactatgttttcttaatatttattttgtgatctcccttttttttttttttttttttttttttgagaccaagtcttgctctgttgcctgggctggagtgcagtggtgcaatcttggctcactgcaacctatgcctcccaggttcaagtgattctcctgcctcagcctcctgagtaagtgggattacaggtgcctgccaccacgcccagctaatttttgtatttttagtagatgtgcggtttcaccatgttggccaggctggtctcaattcctgacctcaagtgatccgcccacctcggccttccaaagtgctgggattacaggcgtgagccaccacgtccggcctgtgatatcctttttatggctggttatgttcctttttttgaagtgcatattatctaatacaaatgtaaccattccaatttttttgaatagtgtttttatagtgtttctcttactatccttgtgtttttaacatatctatgccttatttaaagttagtttcttatacccagaatgaagctggatcttgcttttttcccttagtctgacaattactgtctttcattgacctattaaaccatttaaattgtttttatatagttagatttaaatctgtcatcttgctagctgtcttctgtttgttccttctgttctttgactgattttccccttttttcagattaaatgttttttatagttttattttgtttaatctttaaagttggtgtactagctatatttctgtttgtttctagtggctgctctagggattataacatacatctttcagtttacctttaaataatatgacattacttccctgattgtgtaagaactttatgacaggatacctgttttctctctctcctgctgtgtgctattattgtcatacattttacttctacgtattttataaaacctgtgataccttgccactgtttttgctttagattatcagttatcttttaaagtgataaaaatgaggaaaacaatgccttttatatttatcctcatttttatgaaaaaatgaggataaatttttggagttcttcattactttgcttggatccatccgataccatactgcctgaaaacattccactcatatttcttgtgaatgtatctgccagcaatgaatcatctcagtttttgtttgaaaaagcctgtattttctcttcacttttcaaagatatttttgctagatgtagaattcagttcagttgtcttctggctcgcatagttttcaacaagaagtctgctgtaattcattgttttttgctctatttgccttcaaaatattgtctttgattttcagcagtttcactatgatgtgtctaagttctgtgtgtttttgatcatgcttgagtttcttctgcacttcttggacctgttgtgtgtttccttttttatagtttcaatttctctcttgagatttcggtttcattagatcctttaacatgttaatcagttattttatttttgttatgttatgttgtgttatgttatgttatgttatgttgttatgttattttttgagacagtctcactctttcgcccaggctggagcacagttgcatgatctcagctcactgtgacctccacctcctgagtttaagcaattctcaggtctcagcctctggagtagctgggattataggcatgcaccaccacacccagctaattttcatatttttagtagagatggggttttgccatgttggccaggctggtctgaactcctgacttcaggtgatccacccgcctcagcctcccaaagtggtgggaatacaggcttgagccactgtgcccggcctaatcagttatttttatatctccctctaatcgtttcaacatctggattctctctcagtctggttctgttggttgctttatttcttgacagtgggatattgttttcttttttgtatattttgttttttttttaattaaatgctgaaccttgtatgtagaagaacagtagagactgtgaggtaaatagtgtttatgcatggaaatggacatgcctcttctgtcaggctatgtttgttatggtttgaatcaagttattcaataaccaagctaggtgtctgttttgttgttgctgctgttacccttagtatgccagaggcttccaactccttcagtagtaggctgctactaccttgtgtttaatgtagggcctgaggtgttgttagagggtttttctcagtgttggtttcaccctcatcttttagtcatctctgtacatctccactacagaataggagtctttctccagactctcattgctaggctcttaagggtaataggggaaatgcttgttcttcttgtctggtctccatcttaggtagagcctgtatccctggccttgaatgtggagcccatacttctgctctcaacttctgctggtgcaagatcctgggcttcaggtgtttttgtccctttcttcagcagcaggcatgttttttcattttgttttattttgagacggagttttgctcttgtctcccaggctggagtgcaatggtgtgatctcagctcactgcaacttctgcctcccgggttcaagcaattctgctgcctcagccttccaagtagctaggattacaggcatgcaccaccatgcccagctaattttgtatttttagtagagacagggttttaccatgttggccaggctggtctcaaactcctgacctcaggtgatccaccctccttggtctcccaaagtgctggaattacaggcatgagccaccatgcccggcccaggagcaggcatgttttgttcctggcttcacaccgtgaccccagtggtgagagtttggtgccccttctcagtgacttaggccttttactttgtatgagaatagggtttgggggaaatggatgatggcatttgtttctatttccttgtggcaactaatcacctcctgaatacctgtgctactgggagtggatctatatgatcttctccctttgatcctcctgtttcttctgagtacctcctggaggccgtgaagtaaaacttgtgcatgagtgcagactctccttatggctagggttttcagttatcctaaatatatcctagcccacgtttggcctttaagaatttgttaaaattttacttattttcatcttacttgcttctcttgtggttacctcttctttttatgctctgccaaaagtgagacagttcctgtgtatcacctctcctcagagggccttttcagtctttggaattagttcccctgatctctgttctctgatgtatggtcttacagattatctgttttttgtattgttaaggtagtagcaatgttctattgcagctttctaaattttaaataaaagtagaaccgaaaagttttttaatgaattaatcatacgattagaatggtactttagaagtattaatcagatagtgtataaaacggatttgaggtcggacgtggtggcacacgcctgtaatcccagcactttgggaggccgaggctggtggatcacgaggtcaggagatcaagaccatcctggccaacatggtgaaaccctgtctctactaaaaacaaaaaattacctgggcggggtggcaagtacctgtagtcccagctactcgggaggctgaggcaggagaatcacttgaacctgggaggcagaggttgcaatgagctgagattgcaccactgcactccagcttgtcatcagagtgagactctgtctcaaaaaatcaaaaaaaacaaacaaaaaaaaccagatttgagatgatatggcctgtcctctacctggaatattttcacctgtttattttccctttgaagactgaacacctcaggtgggcagctcgggaagccattagacatcattatgtaaatatccttcacttgagttcctatagcgttccttgtccactttttggaacaccaaccagcttttagacagttatctccccaaagggagatatagtatttagcccaaatttgtcttataaataaaacggtatataacttcagctgtgtgaattctaaaatataagctaaaagatggcttttaaagtcatactaccatattgtttcatatgtaagaatagtaaaatgaatttacctaagtttaaatttttagcacagaacattgctgaaaaaaatcctccttttaatgttagggtaaaatattactatattgacccacctacaaaataaaaaacatatttattctgccagatttttctgttgatttcagatacgatcatactgacacattcttttttttttttttttttttttttgagacagagtttcactcttgtcgcccaggctggagtgcagtggtgcgatcttggctcactgcaacctgcacctcccaggtccaagcaattctcctgtctcagcctcctgagtagctgggattgcaggtgcctgccaccatgccccagctaatttttaaattgtttaaaacgtaatctgtttatttggagtggctatattgtatattgagccagattagtagctaacaattttttgagtacttactttgtatcaagcactgtcttgctttcttatgagtcctcttttttaatcctcacagcagccctttgggatagataaattaaataacttgcccaacatcacctagcttagaatgggaggagctgggatctgaacccagcagtctgttctaagattggaagcaggctttgttcttagtcactgagctattttagttccttcaaagtgaattaagatgttgaatgaaaagttctcaagatttgtatgagtagcgcagatcacagttgaaaagtgtaagcttaagtactatgccagaattggatatgtggagggacagtaaatatatgtctcagggaatggtggagacattatgcaattcagaggacatgaacataattctcattattttttcctaccagtatgaagtgaaggctcctgttccttctgcctgtttcaggaatatttgtaagcaaatgacaaaaatgcacgaagctatatttgatctccttccagaagaacaaacacaggtgagaagtaattcctaaaactattcatgtatatataacatacaatatctgtacagaattggggtgtttttacatgcttttggcagttaagctgttcatgttccaatatgattatcatttttttacattgttatattgactggtagaacatggataaaaatttctaatttctaagtgctccttgcagtgacagaccagagctagagctttactatattataaacaattctaaaaagtaggttttccatttgtccatgatcagtagtcccagattctgcttacatcatttattacgctgttcttggaaaattagagttggcctttatcaatgagtagcaaaatatgttacggtgattgtaattcaaattggatatggaaagaattagtgatagagttaataagattaacacatataattaactcaatctgctttattgttatgtcagcataagagatctgtagtaaagacaaactaggaaaaagagcaaaatggagggtgggggagtctttgacacctctcagctatgaagtatccacccttctatcgctactgtattcccttacaaaagtattatcacagagttctcttcactcctcagtaacagctctacccgctacagccctgttgcgctctcctggaactttgaagttttcagtattcccttttttaccagttttgtttttttttttaatctcagcttatttcctctgaactaagtgtgcctggtttgtagaataaatggtataatattaaagtctagttgctgtatgactaatgaatttaactttcactgagatttctgctattcagacaagtttgtttatttcagtttgtctctcttacttggttgagtgcgtggaaatggtatttgggagcagagggtggctttcttagtgtctcttgcctactgttggtcctgctggtctcctttcctatgctacctcaaacttccatcctatactagctgttaacattttcttcgtacttccctaggttttcataaatcataccaaactcatgaataaatatcatgtaactcctttgggactcactgaggactgaaggggagccgtaaaatacgacgtacccactagggtcgtctcctttttccttctaatttcttcttagccaagccatcctttccattccacatgtaagatcctccacctctgacattctaaccttctggatttgccatctgagttctaattctagagcaggacttacccaggtcagggagctgggcatacaggtacttcatgtgttttatctgtggcgtaatttaaagggtactcttgtcaatgctgggcaaatgttattttatgtcactattgccacttgaatactagtaattccacaaaacttccatagattattatatatatttttcccacagaaaatgttatttcacaaaatcatttcataatttcattgtatataattttaggttaggtatttcccaaagaaatattgggtcattgcatgcaagaacaataaaatgctttgaagtgatttcactagattagaagtacgaaggtatctttgcctctatcattatgacattttttcccctaccaacttcctacttactatgttacaaaattccccactactttttattatttttacctgtcacagttgatcccacttacgggaatttttccaaaaaggagtactgctaaggagggtaaaaaggtttttccaactaaggagaaaaaatgtagtgaaatagcaatagaatactttcagaggaggattttaaaagtatatgtcaaagcaaaggttttggtttttaaaaatactttctctaaataatattgataactcagatatcttctatttcagtagaactttaagaaacttagttttatttctttttcagatgttatttttaagaattaatgcaagttataaactccacttgaaaaagcagttatctcacttaaatgtgataaatgatggaggacctcaaaatgggtatgttttttaacgttttcaccatatactcccatatcgaattgttttaatgatcagttttgattatttgtgccatccttttctgctgtaatcacactgaagaccaacgttgtaaaatcagcaagcttttgtgttttttttttcccctgtggaaatatctgtttctatctaactatctaaaaggggtttatacatggacaattgcttacctgacgttatgtatctgttttgaggcagtgtgaattagtagcacttccttagttacccaatagctttccctattccaaacaggattcagaagtcctactgtgtgaccatgtgaatgtcacttaacctgtgtgccacatttataaaataacaaggatgaaatctgtcttaattctttcacagggttatgaaaaataatatatgtgtgtatatgtatatattttattgtaagctattgaaagattgtatatattactgtaaaatagcatagtacatagaaagcatagggtaggacttagaatctgaaaacttgggttaagttctagttctgtcacttactagctgttgtaactttgggcaaatcacttactccccctcagcttaggttttttagatttgaaaatagggatgatgataaaagtttccttaataggattttttgaagagttatgtagataaagatatggggaagagattttataaaatttaaagcactgatcatttagttacgtattaatatcaattctttagtgttctagggtttttaggaataaaattttatttcctgttaaaggaatttcaggctcaaatttcaaacttataagaacaaatggaaaatgaaaaaaatgtatgttggggtcagaagttggccctgccatttaagaagaagtacagtgaatcaattttgcaaagagctatgtgaaagcttcattctgttgaatctgttaggctgaatttaagagttttatgcaagaatgatagtcttattatctgattcttctttttctttttaaagaattatttgttttcaaaaatttcaaagccatggaacacttaaaggacaataatgaacactgaatagcttttacctagatttatcaactgttaaaattttgccacatactctctgccacttttgctccttctccctcccacccccatacctcccttttgacaaacaaccaaaaaagtaggctgcagtcataaaatttaacccttaaatactttggcatgtgtctctaaaaacaaggacatttttatacaaccgtaatacctgaaccccacctaagaaaatcaacattaatagcgttataccaacatagagtcagatattttcagcaagaacatcacatgtggtgacgctgtgtatatctctcacttgatgtcagatgatacaaatggtacatacataagagacctgctcctgaaaagataatagcatattagaaacttaggagactcttggtagagatgtatactgggtaccttaaagaggctgttcaaaaaaagctaataatatttttaaggcctaaccctgctcatacccttttacttttattcccataactaaatctgggttggttagttgggtttttgtagaccagtagttctgaagcacccaagctaactcgttagctgttacttttctttcttaatatagctatttggaagtcagtctgaccttagagaatcctcactgtcacatgctaacagaaactcattctttataagtcaattcatgtctttgaaatatccctgaagattaacctctaccctgtagccaaggacataaactacctgcttaaaagtttttgtttctgaaattgctctaaaaatgtagcttttgactttttttgaggtgaaattcacataacataaaattaactattttaaagtgaacaattcagtggcacttagtgtcttcacagtgatgcgtaaccgccacctctatctagttccaaacattttcactactccaaaagaaaatcctgtacccattaggcagctgcttcctatttctccctctccccagccctgtactttgattttattttgagatggagtatcactctgtcacacaggctggagcgcagtggcgtgatctcagctcactgcaacctccacctcccaggttcaagcaattctcctgcctcagcctcccaagtagctgggattacaggcacgtgccaccacgcctggctactttttgtatttttagtagagacggttttaccatgttggccaggctggtcttaaactcctgacctcaggtgatctgcctgcctcggcctcccaaagtgctgggattataggtatgagccactgcacccggcccagctctgtactttttaatgtgattttttttcctctaagatattttaaaaatagacacatacagagaataataaattatttatatttctactacccagaattgatcaacatttgtcattttctcttgaaaaaaatatttattgtatttttaaaatggtattcaaaaaattgcattccagatgaagctaagtacacctttacaccccatctgcagtccgattccctttttctcccagcctttaggtaacatttccagtgaatttagtctacattcttttagtcttatttattgtacctagatttatgaaaaatatgtagtgctgttttgtaaatttacttatatggtatattgcatatatgcagcttgctttctactaggcatttttactgatttatctatgttgatatatgtttagtagtctgtttttgactgctgtacagtattccatcaaacaaccttttttttttttttggagacagggtctcatggtcacacaggctggagggcagtggtgtgatcatggctcactgcagcctcaacctccgtggctcaagcaatcctcccactgcagactccccaataactgcgactacaggtgtgtggcaccacacccagctaatttttttaattttttgtagagacgaggtctcactatgttgcccaggctggtcttaaactcctgagctcaggtgatcctcctgcctcagcctccccaagtgctgggattacaggtgtgagccactgctcctggccatgaatcagccatagataaattagacatttcccctagtgataaattgctaagtcattacttttttccattataaccatgccatactgaagatctttatacatgtctaatggtgtgaccatttcttcagggcatatacctataagtgaattggagctaatacacttttcatattgttaggtattgacagtggctgtaccaactcccacattagtggagtagtttgtgagaatttgtttcccacatcttttcaacatttgctgttagatttcctaattgttgctagtctgatgggggatagtagtaccttgttttgatttgcattttcctgacgtttaccattttttcagtttattggttattcaggtgttttcatctgtgacttcttatgttctttcctatttttctcttgggtttttaaagaaatatccagtatcgcttatatacatgaatactagtctgtatttaacgccttagatgacacttagaaacctagcctgcttttcccttgagtttactattttagtcagcactcccatactctagtgctaaccaatcaaaaacattttagtttagcctgttattttctctgtatattaattcatgctgtttcaagataaatctgattttcttgggctgaatttatcatgaaactgactctaacagccattggtttattcattttccaaatatttattattgaagtacagcattaaatggcctacttattcatagcaggaatcctgctaagtaaagtatttggacacttgggcactaagaaatctgaattttagataataggactctgactcggtgagcactgttactttaattatctgaatagaaagtttgagatttaaaaaataattttctctccattatttaggttggtcacagcagatgtagctttttacactggaaatcttcaagccttaaaaggccttaaagatttggacctaaatatggccgaaatttgggagcagaagaggtgatgtcatcctggaaaactgggtagttcatctgaccatgggatgtgtttgttatgaagaaaatctggatgcctgtgattcgagaattgaacctgaaacccaaagtgaactggggtgggggaagggaaaaaggaaagtatcaagtgttgggaaactggattcagtgggatctacaaggaatgtcatttttgtgcatcctacagtgaggagtaactgatcaggtgtctataacatttttcattctctctggaaacagactcaggtttctttggaccaaatccaaaagaacacatagctgtaacacagctgtagttgactagaatgctctgtatactttatattaaaaaatgctttgcatttcttccagtgcaatgaaattcatatggtgtcccaccttatttaatgatggtacaatttaaaatcttagtcaacttctgtagaaagttttctctatgaaagtaaagctgtttgaaaaattattatttttttacagatctttctataaaaaataaacatcttttgattgcttggatttaggaattcaatttttgtttcagtgaccaatgtcaagttgcaggctttgtgtgttgcatatttaatatttctactaccaccgtatgtcaactgggtaaagccttccagagctctctaaatacctgaaagacttaagcctttttttaagtaattaatacttaaaaaaaaagatcctggcatctatttatgcaactaaatacttttcagaaatggtatataaaaggctacagtttaatatctgtatttttataaaagtatgatgaagggtttggggtgtttttatttgtagcagaggtaagaatatgtattcatataatctgcctacttttgagttctcatattaacatttagataacatatgaagtatggcccccttggatccttgtttttaagttactttcgatgtgtatacgaacaaagaccagggagaaacagaacttttaaaactataggctgctgtgttggggccagaaataaggtgacaagtaaagacttttataatacctaccttcaaaattagaatcagcagcactgtacaaataaagtgcctgtgcttcacctcacaccaagaatcttgcctaaccctgtcagagtgcctaatatcctgtggtgattatgtataatgaaacagtcttattttgtgctctttggtttcttaaaaggaaagcttgttttctttcctttatcattacagaggtatgtctttggttcttaaactatctgtctaaaataaagctgtaaaaaattaac

SEQ ID NO: 16 - DNA, 188851 bp, Homo sapiens
agtttggagtcgtttgctgcggggagggaatgaatgggcgctgggaacacgcccgcgaggtggggacgcgccggccgtagcgaggtccttagcgtgtgagtggccggggtcgggtcgcttccccgcagcatggaggacgatgcaccagtgatctacgggctggagttccaggtgggtcactgggagggcggcaggtgctgctcggcctggctgttgatagcatgcgcggtcccatggtgacttcggtttgcagatctcccaccagccctgcaaggacccgtgtctgttccctagttcccattttgcagagaagtaaactgaggctttaggaggttaaacggttgtactggataacagggttggccacagccggcctgcctccttccccttcacatcctgtcccgaacatgacttctgacctggaagttatcactcactttggtggactcatttatttacacgcccaccttttcctctagaatttgagttcctgaaggtaggaactgtatgttgtttaaaataaaaatgtttgattttgaaacaatttaaagtatttagaagagttgtaaaaatacatagaaagttcttctttaccctccacccagcttcccttaatgttaacactttacataaccatcgtacatttatcacagcttagaaattaacattggtacactaatattcagtaaaccacagactgtcttcggattcaactgttttcacactagttttttaccttgtattttccagtgccttttcatgactgtcacatagtaggtgttcaacaaatgactatgaaccgaatgagcccccagagcataagcaatgcacatggtagttcaggacagcaagaaagctgccgtggatagagtaaatgcgtcagggggaatgaggtaggggatgagatgagcgggggaggaagatgaggattgtgtagggcctgttagagccctgtcctggttttcatctattcaagtagcttttgagaatgtgttatgcctaaagcactgagggacagatagagagatagaaacacagttcactgccatatgaaatacttgatacataattttgtgcagcagtatgtgttaaagatataaatgatgtctgctttttttttttttttttgagatggagtcttgctccgttgcccaggctagagtgcagtggcgtgacctcggctcactgcaacctccgcctcccgggtttaagtgattctcctgcctcaacctcccaagtagctgggattacaggcacccgccaccacgcccgactaatttttgtatttttagtagatacggggtttcaccatcttggcctggctggttttgaactcctgaccttgtgatctgcctgcctcagcctcccaaagtgttgggattacaggcgtgagccaccgcacctggccaatgtctgtttttaagtaggttacagtcagagaggcagcagtgttagtagaataacatatgccacccagacacctaagttttaaatcctgcctctagcacttattaactatgtgaccttgggcctcggtttccttgccaataaaatatgcatctccctcccccccacctcatggctgttatgaaattaaatgagttaatacacttaattgaatcacgtagaacagtgcctggtgcatagtgtgttcaataattgttgttctaattgttataatgagagaaaattccttttttttcctttgtagaaatggggtttcgccatgttgcccaggctggtctcacactcctgagctcaagtgatctgccctccttggcctcccaaagtgctgggattatagtcatgagccaccgcaccctgcctaagacaaaattcttacaaataaattttatacagggcagcagttaagtgtcctgtataataaactgtgctataggatttgaccagtggctatatcacattcacaagactgatagcttaactaccagtgatttagctctggactatgtgtcagacactctgcttagcactgtacaaatatttcatttaattctcacagcaatcattattggtaggtgttattgttcctgttttacggatgaagagacagcctcagagagaatagttacctgtccaaggccacttaactagtaaatgatagaccttggattctgacctacttagactttcaacccaaactgacctcgagtccccttacctgctaagttctactgctttctctttaactagatacacatagggatacacagggagagaccacatgggtagatagaaggttctataatcttgtactacctgaagatgcatactctgccagtgctacttaatttaacttcttgatctccttaagaaatctctcaaaaaacccagaggattttatcttcagtattgtatctttgaggttaactgaaatgttattttcttttttttctctcttttttttttaaattattattatattttaagttttaaggtacatgtgcacaatgtgccagttagttacatatgtatacatgtgccatgctggtgtgctgcacccattaactcgtcattcagcattaggtatatctcctaatgctatccctcccccctccccccaccccacaacagtccccagagtgtgatgttccccttcctgtgtccatgtgttctcattgttcaattcccatctgtgagtgagaacatgcagtgtttggttttttgtccttgcgacagtttactgagaatgatgatttccaatttcatccacgtccctacaaaggacatgaactcatcattttttatggctgcatagtattccatggtgtatatgtgccacattttcttaatccagtctatcattgttggacatttgggttggttccaagtctttgctattgtgaatagtgccgcaataaacatacgtgtgcatgtgtctttatagcagcatgatttatagtcctttgggtatatacccagtaatgggatggctgggtcaaatggtatttctggttctagatccctgaggaatcgccacactgacttccacaatggttgaactagtttacagtcccaccaacagtgtaaaagtgttcctatttctccacatcctctccagcacctgttgtttcctgactttttaatgattgccattctaactggtgtgagatggtatctcattgtggttttgatttgcatttctctgatggccagtgatgatgagcattttttcatgtgtcttttggctgcataaatgtcttcttttgagaagtgtctgctcatatcctttgcccactttttgatggggttttttgtttttttcttgtaaatttgtttgagttcattgtagattctggatattagccctttgtcagatgagcaggttgtgaaaattttctcccattttgtaggttgcctgttcactctgttggtagtttcttttgctgtacagaagctctttagtttaatgagatcccatttgtcaattttggcttttgttggcattgcttttggtgttttagacatgaagtccttgcccatgcctatgtcctgaatggtaatgcctaggttttcttctagggttcttatggttttaggtctaacgtttaagtctttattccatcttgaattaatttttgtataaggtgtaaggaagggatccagtttcagctttctacatatggctagccagttttcccagcaccatttattaaatagggaatcctttccccattgcttgtttttgtcaggtttgtcaaagatcagatagttgtagatatgcggcattatttctgagggctctgttctgttccattgatctgtatctctgttttggtaccagtaacatgctgttttggttactgtagccttgtagtatagtttgaagtcaggtagcgtgatgcctccagctttgttcttttggcttaggattgacttggcgatgagggctcttttttggttccatatgaactttaaagtagttttttctaattctgtgaagaaagtcattggtagcttgatggggatggcattgaatctataaattaccttgggcagtatggccattttcacgatattgattcttcctacccatgagcatggaatgttcttccatttgtttgtattctcttctatttcattgagcagtggtttgtagttctccttgaagaggtccttcatgtgccttgcaagttggattcctaggtattttattctctttgaagcaattgtgaatgggagttcacttatgatttggctctctgtttgtctgttattggtgtataagaatgcttgtgatttttgtacattgattttgtatcctgagactttgctgaagttgcttatcagcttaaggagattttgggctgagacaatggggttttctagatatacaatcatgtcgtctgcaaacagggacaatttgacttcctcttttcctaatcgaatagcctttatttccttctgcctaattgccctggccagaacttccaacactatgttgaataggagtggtgagagagggcatccctgtcttgtgccagttttcaaagggaatgcttccagtttttgcccattcagtatgatattggctgtgggtttgtcatagatagctcttattattttgagatacttcccatcaatacctaatttattgagagtttttagcatgaagcgttgttgaattttgtcaaaggccttttctgcatctattgagataatcatatggtttttgtctttggttctgtttatatgctggattacatttattgatttgcgtagattgaaccagccttgtatcccagggatgaagcccgcttgatcatggtggataagctttttgatgtgctgctggattcagtttgccagtattttattgaggatttttgcatcaatgttcatcaaggatattggtctaaaattctcttttttggttgtgtctctgcccggctttggtatcaggatgatgctggcctaataaaatgagttagggaggattccctctttttctattgattggaatagtttcagaaggaatggtaccagttcctccttatacctctggtagaattcggctgtgaatccatctggtcctggactctttttggttggtaagctattgattattgccacaatttcagatcctattattggtctattcagagattcaacttcttcctggtttagtcttgggagagtgtatgtgttgaggaatttatccatttcttctagattttctagtttatttgcgtagaggtgttggtagtattctctgatggtagtttgtatttctgtgggattggtggtgatatccccttcgtcattttttattgcgtctatttgattcttctctttttttctttattagtcttgctagcggtctatcaattttgttgatcctttcaaaaaaccagctcctggattcattaattttttgaagggttttttgtgtctctatttccttcagttctgctctgattttagttatttcttgccttctgctagcttttgaatgtgtttgctcttgcttttctagttcttttaattgtgatgttaggtgtcaattttggatctttcctgctttctcttgtgggcatttagtgctataaatttccctctacacactgctttgaatgtgtcccagagattctggtatgttgtgtctttgttctcattggtttcaaagaacatctttatttctgccttcatttcattatgtacccagtagtcattcaggagcaggttgttcagtttccatgtagttgagcggttttgaatgagtttcttaatcctgagttctagtttgattgcactgttgtctgagagatagtttgttataatttctgttcttttacatttgctgaggagagctttacttccaactatgtggtcaattttggaataggtgtggcgtggtgctgaaaaaaatgtatattctgttgatttggggtggggagttctgtagatatctattaggtccgcttggtgcagagctgagttcaattcctgggtatcctttttaactttctgtgtcgttgatctgtctaatgttgacagtggggtgttaaagtctcccattattattgtgtgggagtctaagtctctttgtaggtcactcaggacttactttatgaatctgggtgctcctgtattgggtgcatatatatttaggatagttagctcttgttgttgaattgatccctttacccttaagtaatgggcttctttgtctcttttgatctttgttggtttaaagtgtgttttatcagagactaggattgcaacccctgcctttttttgttttccatttgcttggtagatcttcctccatccttttattttgagcctatgtgtgtctctgcacgtgagatgggcttcctgaatacagcacactgatgggtcttgactctttatccaatttgccagtctgtgtcttttaattggagcatttagtgcatttacatttaaggttaatattatgtgtgaatttgatcctgtcatgctgttagctggttattttgcttgttagttgatgcagtttcttcctaatgtcgatggtctttacattttggcatgagtttgcagcggctggtacggttatgcctttccatgtttagtgcttccttcaggagctcttttagggcaggcctggtggtggcaaaacctctcagcatttgcttgtctgtaaagtattttatttctccttcacttatgaagcttaatttggctggatatgaaattctgggttgaaaattattttctttaagaatgttgaatattggcccctactctctcctggcttgtagagtttctgccgagagatccgctgttagtctgatgggcttccctttgtgggtaacccgacctttctctctggctgcgcttaacattttttccttcatttcaactttggtgaatctgacaattatgtgtcttggagttgctcttctcgaggagtatctttgtggcattctctgtatttcctgaatctgaatgttggcttgccttgctagattggggaagttctcctggataatatcctgcagagtgttttccaacttggttccattctccccatcactttcaggtacaccaatcaggtgcagatttggtcttttcacatagtcccatatttcttggaggctttgttcatttctttttattcttttttctctaaacttcccttctcgcttcatttcattcatttcatcttccatcactgataccctttcttccagttgatcgcatcggctcctgaggcttctgcattcttcacatagttctcgagccttggctttcagctccatcagctcctttaagcacttctctgtattggttattctagttatacattcgtctaaatttttttcaaagttttcaacttctttgcctttggtttgaatttcctcctgtagctcggagtagtttgatcgtctgaagccttcttctctcaactcgtcaaagtcattctccgtccagctttgttccgttgctggtgagggactgcgttcctttggaggaggagaagcgctctgctttttagagtttccagtttttctgctctgttttttccccatctttgtggttttatctacttttggtctttgatgatgatgatgtacagatgggtttttggttggatgtcctttctgtttgttagttttccttctaacagacaggaccctcagctgcaggtctgttggagtttgctagaggtccactccagaccctgtttgcctgggtatcagcagcggtgtctgcagaaccgcggattttcgtgatccgcgaatgttgctgtatgatcgttcctctggaagttttgtctcagaggagtacccggccgtgtgaggtgtcagtctgcccctacggggggggtgcctcccagttaggctgctcgggggtcaggggtcaaggacccacttgaggaggcagtctgcccgttctcagatctccagctgcgtgctgggagaaccactgctctcttcaaagctgtcagacagggacatttaagtctgcagaggttactgctgtctttttgtttgtctgtgccctgcccccagaggtggagcctacagaggcaggcaggcctccttgagctgtggtgcgctccacccagttcgagcttcccggctgctttgtttacctaagcaatcctgggcaatggcgggcgcccctcccccagcctcgctgccaccttgcagtttgatctcagactgctgtgctagcaatcagcgagactccgtgggcataggaccctccgagccaggtgtgggatataatctcctggtgcgctgtttcctaagcccgtcggaaaagcgcagtatttgggtgggagtggctcaattttccaggtgttgtctgtcacccctttccttgaccaggaaagggaactccctgaccccttgcacttcccgagtgaggcaatgcctcgccctgcttcggcttgcgcacggttcgctgcacccactgacctgcgcccactgtctggcactccctagtgagatgaacccggtacctcatatggaaatgcagaaatcacccgtcttctgcgttgctcacgctgggagctctagaccggagctgttcctagtcggccatcttggctcctccctgaaatattattttctgaggtttgaaaaatgaatgaaattgattctctaaggtagtcaaatatattattggattttcttctttatcttaaaagaagtagctgacttttgctacttggattttatcggatagtatcatggaccaagactttcttaagtttgaagaaccatcattgcagtaaacaagaaaactgaaaaggatagtgtttttttttgtttgtttgtcagtgacattcaaatcccatggagaacactttacatgaaaggatagagatctgatcgttgaccgctgagtgaaggtaatgacacttgaaagataaagggcagtactgcaactgcaaataaaagaccaacacggagggtcgttaagatcgcaaaatgctgagcaaattcatggtaatgattctggatttttttataattatatttgaaatgcatgaaatttcaaatgatatttgaaatgcttttgcacacttttagtttactgctcagtagaaatccattttctcaatatgagtttaatgaatacttgtcagttaacacaacagtagttctttgtgactatctcaaagtgcatacaaacagtatgacttctctcctgcaatcatgtttctttgaacttttgacattaatagatcttctttgttgtgtgggtcaaatctccatgtggcaaacttgccttgtgatgggaacagtgaacctctaggcagtggtggctctgcccatgtgtaggtctgggggcaggcatgtgactaagatggaccagcggcaagcagggcctgcaggtgtgggcagagtgagggctacatctgccaactcctatttgagcccactgctgccaagtgagctgggccagaccagaaaggacggtcggggtgggaaggtgggtgacaatgatgacttgggcttgtttcaagttgctttcccttcggtttaccaccaaaaccaggaagcaagcagggcaggttgtaagccacacaaggatatgcgtgcctcctttctgttctgggaggttctcctggagtcctgagatcagtgcagtcaggtcagaggggcaaagagactgtgggcttttggctttttgtgccatcagtctgagggacagatggaccaggccagcgcttcagggtctgcctgttgccaagtgaggaaagacttttgaaatggaagatggagattaaattttcttttcttttttctttttttgagacagagtcgctctgtcacccgggctggagtgcagtggcgcgatctcaactcactgcaagctccgcctcccgggttcacgccattctcctgcctcagcctcctgagtagctgggtctacaggcgcctgccaccgcgcctggctaattttttgtatttttagagagggggtttcagggtgttagccaggatggtctcgatctcctgaccttgtgatccgtctgccttggcctcccaaagtgctgggattacaggtgtgagcccccgcacccagccgagagattaagttttcaaatgcctttttatatccatggaattgataatttggttttaggatttttctcttttgatctctttggtcagttacattaatagctttttaaatattggcccagcgtttgcatccttagaaagaattccacttgattgtggaatagtcctctgctggattcggtttacgagtcatttactgaaaattttcacgttaatatctgtgtattttcttcgttgagttttgtttcactgctatgctggctgcataaaaagcacttgggaattttccttctgtttctgtgttggaaacaactgaaggtaatattggtgttgcctgctcctaaggtgtggtgctgttacagtgttgacttgttaatctgtggtaactagttgttcagatttcttgtctttcttttctgatcagttttggtaacttacattttcctggaaaattcatcattcattcagtgaacaaatatttattccctgcaataaggcactattatgtgcctggaacacagcataggaggaaacagacaaaatcccagccctcgtggatttacccacccaagacgcacccttgcagaggcatttctgtagaggagtgaagtctctgagaattgaggatttgtcttttaggttgttcccttttttttttttttaatttcatcagttgaatttattttcgtttatttttaatttatttttatttttacttattttttgggacagagtctcgctgtgtggcccagactggagtacagtggcgcaatcttggctcactgcaacctccacctcccaggttcaagtgattctcctgcctcagcctcctgagtagctgggtgtgtgccaccacacctggctaatttttgtatttttagtagagatggggtttcaccacgttggtcaggctggtctcgaactcctgacctcgtgttccgtctgccttggcatcccaaagtgctgggattacaggcgtgagccaccgcgcccggccagttgaaaattttaatacaaaaaattcaaaacaatttcctttcatttgctcagcatttttctatcttaattaccctctatgttggtctttttttatttgcagttgcttaaattatttgtttccattctttttattaatacaagcattttaaacacatggattttcttgtgaacactcacttcttgattttattgttttgtggatgttttgcagctttgaatttaattttgaatttcaggtcaaatttcttttttgtcctcggattcactggagagacccttctcaattctgtccctgtcacctgctgtgttttgggggttgtctgtctttgtgtcctttccactgcagacttccttcctgtgctggaagttttaatttccgtctatttgtcttgggttgtcttgccatatcttctttgagttctgctttgcatttttctcttttacttttcttttcttttttcttttgaaacaagtttttgctgtcacccaggctggagtgcagtggtacaatctcagctcactgcaacctctgcctcctgggttcaagcgattctcctgcttcagcctcccaggtagctgggattacaggtgcatgccaccatacccagctaatttttgtatttttcgtagagacagggttttgccatgttggccaggctggtctcgaactcctgacctcaagtgatccgcccacctggacttcccaaagtgctggaattacaagtgtgagccaccatgccgggcctctttttaaaaagctttttctctcggacggggtggctggccgggcggggggctgacccccccacctccctcccggactgggcggctggccgggcggggggctgactcccccacctgagaaatcggatggttgccgtgtctgtgtagaaagaggtagacatgggagacttttcattttgttctgtactaagaaaaattcttatcctgttgatctgtgaccttacccccaaccctgtgctctctgaaacatgtgctgtgtccactcagggttaaatggattaagggcggtgcaagatgtgctttgttaaacagatgcttgaaggcagcaggctcgttaagagtcatcaccactccctaatctcaagtacccagggacacaaacactgcggaaggccgcagggtcctctgcctaggaaaaccagagacctttgttcacttgtttatctgctgaccttccctccactattgtcctatgaccctgccaaatccccctctgcgagaaacacccaagaatgatcaataaaaataaattaaaaaaaaaaaaaagctttttctgagacaaggtcttgctctgttgaccaggctgtagtgcagtagtgcgatcgtggctcatggcagcctggaactcttgggctcaagctctctcccggcttcagcctcccaagtagccgagactacaagcctagctcatttattatttatttatttatctctatctatctaatctatatagtcaatcacttaatcaatcaatgagatggggggtctcatcatattgtcaggctggtcttgaacttttgggctcaagcaatctttccgccttggcctcttacagttgtggaattatagtcttgagccaccacacccagcttcttttttttttttaattaaaacaattttttaaattgatgcatattaaatgtatatagtttcagggtatatatgataagttaatacatttatatgatggtaaaaatcaaatcagtgtatctgagatatccatcaccttaaatatttgttttttctttatgtcagaaccattcaaattattctcttttagctattttgaaatgtacgatagactgttgtaaactgtagtcaacctgctgatataccaaacactatgtcttatttcctctatccaactgtatatttgtacctattaaccaacttttcttcatccaagccaccctgctatttttctcagtctctggtgaccatcagtctactccattttcagaagatctactttttgtttttagctcccacagatgactgaaaacatgtgttgtctttctatgcttggcttagttcacttaacataatgacctccattttgctgctaatgacaagatttcattctttttttttttctttcttttttttttgagacagggagggtctcactctgtcacccaggctggagtgcagtggtacaatctcggctcactgcaccctctgcctcccaggctcaattgatcctcccacctcaggccctagagtggctgggactacaggtgtgcatcatcacaccaggttaattttttttttgtattttttgtagagatgggatttcatcatgttgcccaggctggtctcaaactcctgagctcaagcaatcctcctgccttggcttcccaaagtgcggggattataggcatgagccactgtccatggcaattttattcttttttatggctgagtaatatttcactgtgtatgtatagcacattttctttatccattcatctgttgatgggcacttaggttgattccatgtcttggctattgtgaacaatgctgcagtatacccacgggtgcaggtatctcttcaacatactgatttcctttcctttgaatatctacccagtagtgggattgctggatgatgtggtagctctatttttagttttttgaggagacgccatactcttcttcataatgactgtactaatttatattcccatcaatagtgtatgagggctccctctctctacatccttgccagcatctgctattttctgcctttttaataaaaattattctatctggggtgaaatgaaatctcattatggttttgatttgcatttctctgacagttagtgatgttgggcatgttttcatagacctgttggccatttgtgcgtcttcttttgagaaatgtctattcagatcttttgcccattttttaattgatttattttggtgtttttttttttttttgctgttgagttgtctgagcttcttatctgttgtggttattaatcgcctgacagatggatatttgcaaatctttaccccattctgtgtcttcttttcttttcttatatatttatgtttttgaggcacggtctcactctgtcaagcaggctggagtgcaggggtgcagtctctgctcattgcagccttggcactcaagcctcccacctcagcctcctgagcagttgggactacaggcgcacacctccacacttggctgacttttatattttatgtagagacgggatttcaccttgttgcccaggctggtcccaaactcttgagctcaagccatttgcccaccttggcctccgtcagtattgggattataggcatgagccaccatgcttggctgcttttcttctcttccctgtttttagaaagatgattccttcattaagttttatgatttttgttgatatgtttgattacaattttcagccatcatgtgtcaatacttcccggtttgtgttttccatcctttgatgtctttttttgtttttcttccctgcccgtctccctttgtagtgcctttgtttggcacctgtgctcgtttcttttgatcgctggtcttttcatggtgaatcttttcctggtccagcaggatctgtatgtggagctgggcccggcccccatcgcaggctggcaggaatgctgacgacatagtgttgtgtttgtgaggaaattctttgagctgtcatttaccccaagcccaaggagaagggcagatgcaggccgcccaggatgcaacacctctccccttagcttgaagagccagaaacagcttcctgagaagacaccaggcagccctgcctgccctactctccttcctaccatgtgtatgggaagtacctgcccccagcctgggcacctgttgctgttgtcccctccagggtttcagcattgcttccagggcatgcatgtggtctagggactgctccctggggcgtgcggggctgtggctcccccagcctgcctccagcacctgctccttcctgacctcagcagccaatgccctctgtcttcagatactatgcctttggattatagatgtttctaagtttcactgtagatggagtttatatttctgttttttcttctcctttttttttttttttgagacagagtctcgctctgtcacccaggctggagtgcagtggggtgatctccttcttcctgcttttgtgtgatttcccagagtctgacaggaaagaaatgaagccttcagcccaccgcttaaaacctgaagtccagatttgacttgataaagtagcttttgtggcaaggtttagggtaaaaactggaacatggactcagtcaggaaaattggttaagaggttgttaaaatgtaatttaagcaccgaatggggagaggagggtggggatggagagcgctggaaaagccagagcccaggtattgggtgtggggctgggagggaggggctcacccccatgtgtatgaatgaatggggcaggctggagggaggggcacatccccctgtgtatgaatggggcaggctgtggggaaggggctcacccctgtgtgtatgaatggggcaggctgggagtgaggggctcatccccgtgtgatgaaaggggctggtgggactggggagggacagggaccagaacggtagttgaggtccaagcttagttgagtggacgtgcccaggggcgcttagtgcgggtctggctcgggcagtttaggatgtgcctgggcaccagattcgcatttggaaagcatgggcctaacttacagaaaagggagcatgccaaagaggaaggtgtggatgagaaaagtcagaatcgaactccagaagcaaaaatgtaggtgaagggagaaagaagagcaggaggcgattgggaaggccttgcagggtgtgcagatggtggaggtgcccgtgtgagggagtccaagggcttgggcagggtcagatggtggaggtgcccgtgtgagggagtccaagggcttgggcagggtcagatggtggaggtgcccgtgtgagggagtccaagggcttgggcagggtcagagggtggaggtgcccgtgtgagggagtccaagggcaggattggggctggaggcggctgttgggtctgacagttgggtgactctgatgactgagtggaggtcaggtcagcacagggtgaggaactgggcgcagctggctggaagggctggaagagcactcctcgcctgcttacccattgttacatctgctgtgagtggaaggacagagatagggcagtagtttgggagggacatcaagtcaaagacagtttttttttttttccaaggagaaagggacatgtgagctgttaactaagaagccagagaagagagagaggtgagagcagaatggctgctatgggggtttcctggaagccagagatggctctgtttccttggggacctgtgaagtgagttctttccttgcagcttagggggttgggcttgcaccaggggcttgcaaagagattacaggtaatatctgccccaggcaatacaaaatggaggaggtgagggtggaatgaaagccccttagctacgtggaaaggcttggacttcaacgggtaagtgcaggagccaatgaatgaatgtgtgttagggcttctgggctctcagaaatagagcatcatcacctcagttctcctggagggtttattttccttttaatgcacttcaattctttgactgcattttttcttttgggtgtaggagatgagaaatgggtatttaggtaacacagaatggggaagttaggactttgccccctttccttcttttcctttttttcttctcttctcttcctccctcctcccttctcctccccttccttccccctcccctttccccatactttcctcttcctgagggtcatcctggtgattggtgagcagcgctttgtagcggtcctttctggagggagactctcagtgtaggagagcaggttcatctgctcctggcctgtgtctgccctgcttcaagctgaagcccctctccacctgccctccttaaaccttctaagtggagaattctgatagcaaagctttaatggacacggtttgctacctgtttctggaaaccacttacttgcttaacctagtaagcaaatgaatacagttttgagtttcccaagggaatggtgtgtgctcagttaatatgtctaggtactgatatttctacctactctaagtagttgtaaggttcctgatgattctttcctgctacgatcctgaactctcagcatttccaattcctttgcctggtttggttccctacagggtggtggcagactagaaatttggctttgtgagaaaaatgccttggcctttctttctttctttcttttttttttttttgagatggagtctcactcttgtcgcctaggctggagtgcaatggcacgatctaggttcactgcaacttctgcctccctggttcaagcaattctcctgccttagcctcttgagtagctgagattacaggcgctcaccaccacgcccagctaagttttgtgtttttagtagagatgggttttcaccatgttggccaggctggtctcgaactcctgacctcaggtgatctgctcgcctcggcctcccaaagtgttgggattacaggcgtgagccactgtgcctagactcgccttggcctttctttataagaactggggaaaatacacagaatttttagtataaagggacctgtgttccagcttctaccaaatgtgccatttgtgttgccagctaccctactttaccatgagagagccatagccgggctgaacgttgggagtgtgggttctttttcccctttggtagctttgaggcagaggcgaagtcacatgaccttgctcgtcctcagtttatgtactaaatgggaataatctgcatcctgtcttctgtgcacttcattgaattatgaggatgaaccaagacagaatgtgtgaaaatgttttttgacatattatactataaaaatttgatcttttgtaataaggtcattggaacacctgtaaaacgatcattctgactagacttagtggtcattttatcattactttaatcaaagaggtagaattatacacttggagatctgtcaccagaatggcccaaattaaataatttttggaaagctcttaaattaaactttttatttcactgtgatttttaaagatacattttagataggtctatacaaatgattctccacttccatttttttttaaagaagtgtcttttcttgtatgagcttgaataagatagtttcaaatttgcaatgcttttccaaaactgcaacctcttcactctgtctgaaacagatgatctatttagacttgtttttctgcctgcttaccatgattcctctccaggtatgcagctctcggctctgcaaattgctttagagtggagtaaattgaataccggttcattgttgtcactcaagcagcttctgcattttctgacttgcccttcatttttcagtatagtagccactgatacaatttacttatttttggttttcttctattttaaagtgatggcatttaatcctgccttctgtctaactttgagctcctgggttcattttgataaatgttaatatgttgttattatggtctgtgccagtgtttttgatacttaatcgtctatcatcttgtcttttaatctttttgagtgtttgtctcctctctcctaatgagagtccaagtttcctgagggcagaggtggcacctcatacctctttgatgcctccacagcacctgccactaggcaacccttcatcactgacttgaggcatagacaagcttttctgtggaaaataatcattccctttgaggtgggtcctctcctgggtgctatttttgggggcttttgggctttttaacgtctagggtgataacacagtcctgcatttgaaaatcttggggttcttgtctgaaggtggacctgtcccggtgttctctctcctgacctggggctcagccttggagtagtcagggctttgtctttcaggaatggcttgccctcctcctcatcagagtcatctttctccaagccagagctgtttaaattggatagcgtcagaggctctgtgacttgctgataattatatgcaaaattttctgtgcatatatgcacctttttggcagaaggcctataactttatgagtctaaagctccaaaaattgtccagggaagttgcagcagagggtagaggaataccgacagtgggacccttaaatgtatcttgaagagttgaattggctcacacagatattttctccaggtgtctaatcatgggaatgttgctctagacatgtgtattctcggttttattgaaatgtattttagctgttgaagttttgtgctgctattttgggaaggttgggaacatagataatattggttatgttttctaagaacagttcatgaaattgttctctctcaacttttttgcagtggacacccaagagatgtccttgttttgctctagttgtggaaaccaagtcaaaactaggcagactaaatggtcagggcaaccgttcacttgtttctcttaactggttttgaaagaaatgaatcaaaacaccagaaagaacacgtaagagttggatgtgactgccgaggaggtgggaagtgggtgtcaggtgtattcggagctccgtatgggaagggggcatgaccgaatgggggcatttagtgagctgtaggatgcagggttagtttcctgttgctgccataacaaattcccataaacgtagtggctcaaaataacataattttattattttacggttctgtaagtcagaaacccaaaatgaatctccctgggctaaagtcaagacataagtaggtctctgttacttcctggaggcactaggggagaatctgtgtcttcaccttttttaactttcagaggcacccacattccttggctcacggactctgttaaaagaaaaacttcagctgaattaaatttaaaggagtttaattgaacaatgatcaattcgtgaattgggcagcccccagaatcacagcagattcagagagactccagggatgccttgtggtcaggacaaatttataaacaaataaagggaagtgacatacagaaatgggaagtgaggtgcagaaacagctggatgggttacaggctggcatttgccttatttgaacacagtttgaacactcagcagtgtatgagtggttgaagtatggctgctgggattggccaagactcagttgttacaggtgcatactcctaagttaggttctcaatcttgtctgcatattaaggtaggttatgtttcatccacaaggactcaaatatagaagcagggagtccttctcaggccatatttagtttgctttaacaactctcattcatctctaaatccagcaacagccactgggtcctcctcacagctgccattgttactggtggagggtgtccaggttcttggcatcttgagcaaagaactggacaaaacaaagtgaggaaagaatgaagcaacaaatgcagagagttactgaaaatgaaagtacgctccatggggtgggattgggccgagcagctgctcaagggccctgaatgcagaatcttctcaggtccaaatacctgctggaggtttcccattggccacttggtgtttaccccatgtaaatgaagtgatggcccacaatcagtgtgattggttgtagaaagcaaccaatcagagcaaccaatcagaggctacagtgaagttacaaagttacagctttatgcaaacatctgattagttgcaaaaagcaaccaatcagaggtactttcaatttccctactgccatgcagaaaaggtgagggtttgcaaagggtgtagcctctggtccttttgttacttgggtggggaaaattagcgttttcctttcagtttagttctaggaagtcagggtgaattggccttaggccctgcctccagaccctgttctcctgcctcaccacctctctgattctcttttctgtggtcacatttctctggggctacagccagggaaggttttctgatttcagtgacccatgcgattaaataatccaggagagcctcctcatctcaaggtccttaatctaagcacatcagcagagtccctttaccgcgtaagttcacattcacaggttctggggattagaatgtggatatggatggagggccattattatgctggccacgggaacttgatccaggtgcagttaatgcttgtcctaaaacagatggatttgaatttataagcctgcagtgctagtcacagctctagtaaccagttgtacaactttttcctctaagcctcagattcatcacctgagatcttagttttatcttctaattattaaacatattaaccatagctattgcaattcaggctgttgtatacagcctacgtttctctttcaggaaatccagccacttctgagattgctgggggctgatagctctcagctgggccctgctccaggaattgccctcagctgaacagaggcactttgcgcaaggtcacacccctcctcaggaaaagcctgcatccagtgactgacccatgggggtaggggttgggtggtataaaaccccggccatctggccttaactctgaagggccgtccggctccagagctccccattggattggctgagacctccattgcagatgtgatgcatttcatcttctccctcagcccagcccttcctccttcaccccaacatggaatagttcccaagagcactcgctagtaagtctcctttagataccgttagaactttagagcttgcttcccagggaccctgtttgaatcctcggtagccgtttttctgttggttgttgtttcttttggtttttgatcatgtggttttgttttattgtatgactggctattttaattatttattcattttattttattttattttattttatttagacagggtcttgttcggtcacccaggctagagtgcagtggtttgatcatggcttatgtaacctcaaactcctgggctcgagtgatcctcctgccccagcctcttgagcagctaagtcaacaggcacgagccaccattcccagatgatttttacaatttattttgcagagatagagtcttgctatattgcccagattggttggccagaactcctggcctcaagtgatcttactgcctcaggctcccaaagtgctgagattagaggtgtgagccaccatgcttggccttatgactggctatttttgattaaatgttgaacatttttcagtgtcagattttagacttgggatgttatcttcctccagaggactgacttctggcaggaggctggctagcctaagagcactggcctgctccaatcaggattgagatgacttggagctttagcctgtgcaggttggtctgattctcatttgccttcactcctgggctgtacacctgtggggttagtgctttacaggctcttctcccaggtgggccctgtgcttgggtttttgtgccctgagctccacgagtctgtcaaagctctcgtcagcatcagcctatcagccaggctttccagactggcaggtgcctttaggtgaagcgtgaccaggtgctgggcttcccccctaggcttcctcctgtcctggatcttggcatttctttgttgccttggtagttatctgaggctgtgaaacagattcaggttattcttttagtttttctagttgttatctgcagaagagttggtttaaaccccctactctgctattgctggaagctattttctgctgtattgttgaagtataatttgtttaaccagtcttttactgttgaaataatagttttactaaaaattaatttaaacattgatgtgtagataatttacatctttattacttaattttgtacccatttacaatgatttccatatgcaaatttgaagtggaattgtgttgaaagtgtgcaaaagtcaaaggcatttaatacatatttctaaattgctttccagacactctgtactaatttatactttatcaacagtagatgagataaactgcctttttaaatctaacttcataatctctattaaatctaacttcataaatgtgcatgtgtttttcttccctcctgcaggcacgtgccttaacacctcaaactgcagaaacagatgccattcggtttttggttgggacgcagtctcttaaatatgataatcaggtaactatttttgacaaatgtatacatgataattactaagcctattcttagttttataaccattttgctctgattttccagcaacatttgagaaattaatgccacataaacaaaataaaactttcatttggatttaagtctatcttcaaatcaaagaatattatccatctatatgtatcgactgtgttcagtaatttaaacttcctctgtttggcatgacttccgtagtcttgtttggctcttgtggttatatagatttggctttatgagcaattgagaagcaaggatatgtggtcaccactaccccttcttcttggcctgtggattccttctttaattgctcatagaactctttctaggtgagtgtggggtgtgtcacaacctcatccctacttgacccaggccacttgatctgtcactgccccttgatccaggtggggatacagatgggaccctttggtgttctggtcactgtagcggacacttaggagatcggattcggttcatggcctggcagtaaccacgtgaccttgagcacacggattccccttgctggactccattttcttattgctaaagtggagattaaaatgagatgccgtggtgattgcaaagatgtgcattgtctttgacactgggaaaatgtgcgggaggccatgtcagacatggtctagggcttctgtccggcttatctgatcacacaggggaaatggcattcaaatagctgtcgaagaatacgcaggcctggataggatgtagtgaaactgtcactctcgtatgtcgataaagatttaaagtcagcatagtcattggcaactagttcagtgatacatccttagagcttcataaataaatgtttatatacttaatctgtaattcctgtatcccaaacctaggaaaaatcattatacacgaagaatattaattataatgatacttatagttataaaaacttacaagcaatcagaatatcaaaatgcgtgaatgttaggttgaacaatatgaaattgccacttgtaatggcagattcatacacttccctcaggttgaatctggttactcacagtgaatagtattcccttattacactcattaaaagttatagactcctaagaaacatgacaacttaagaatcgttagatgatttggtgggatgttaaaattgtgcttacagtatgatcaacgtggtgtaaaaaagcaaagtgcacaattgaatctcttcttagaataaagactggaaggaaataggccaaaaaggactaaaaattgagccaagggttatcttcagatgcttttcacaggggatgtgttccaagaccacccagcggatgccaggaaaccttggtgagtactgaaccctaaacatatcatgctttttcctatacttacatataggtaaagtttaaggtataagttaggcacaacaaaagcttaacaacataactaataaaaacacaatgattattagttatgaaagttatatgaatatggtctctgtctgtcagaacaccttactgtactatactcacccttcttctggtttttgtttttttgagacagagtttcactctgttgcccaggctagagtgcaatggcacgatctcagctcactgcaacctccgcctcccaggttgaagtgattctcctgcctcagcctcctgagtggctgggattacaggcatgcaccaccacgcccagctaatttttgtatttttagtagagacggggtttcaccacgttggccaggctggtctcaaactcctgacctcaggttatctgctggcctcagcctcccaaagtgttgggattacaggcgtgagccactgcgcccagccactcatcctttttcttgagaagatgtgcaataatataaggcctgtgtgatgagatgaagtgaggggaatgacataggcattgtgatgtagcgttaggctattactgaccttcagaggatatgtcaacagcaggagtatctgttttgggtgatctggatcatcaagccataaggtgttgatggttggatgtcaggaacagacagtgtgggtggctcaggggcaggtagcttctgtagcatggatatgctgatcaaaggtgtcgggaacagacagtgtggttggctcaggggcaggtagcttctgtagcatggatatgctgatcaaaggtgtcgggaacagacagtgtggatggctcaggggcaggtagcttctgtagcatggatatgctgatcaaaggtgtccggaacagacagtgtgggtggctcaggggcaggtcgcttctgtagcatggatatgctgatcaaaggtgtcgggaacagacagtatggatggctcaggggcaggtcgcttctgtagcatggatatgctgatcaaaggtgtccggaacagacagtgtgggtggctcaggggcaggtcgcttctgtagcatggatatgctgatcaaaggtgtccggaacagacagtgtgggtggctcaggggcaggtcgcttctgtagcatggatatgctgatcaaaggtgtccggaacagacagtgtgggtggctcaggggcaggtagcttctgtagcatggatatgctgatcaaagggatgactcacgtttcgggtgggatggagtgggatggctccagacttcaccacactactcagaatggtatgtgatttagacttatgaattgcttatttctggaatttttcatttaatatttttgtgttacacttgaccacaggtaactgaaacctgagaaagcaaaacctcaaattgggatgaggtgggggcaacatctattcaggatgtaaaattcttttctttctaatgttttgttttccgaatgtgtatgtatgtatgtgtgttacttttctactggaaaaaatataagaagggaattacttatttataaaaatagttaccagtggccacctgaaaaggaaggaggacccaccatgaagatggcctgtggtttcagggatggtgcctacaggggagttggggagtaaaacccacatgggagatagtggcacagagataggatgggaggcacgccagtctgccttccaaatgcagcttcagaaagcagaagtcagcagaaacccaggaattcaacacaaaatggggccatggaaagcatgatagttatgagtaaattactgtgtacctgctcttagccagaatgtagtaatggcatttccatttggtaatgacattaatgaagaaccattggtaccaaagttatcaaaatagaagaaataagaagaggccaggtgtggtcgctcacgcatgtaatcccagcacttcaggaggccaaggcgggtggatcacttgagatgaagagttcaagaccagcctggccaacatggtgaaaccctgtctctactaaaaatacaaaaattagctgggtgtggtggcacgcacctgtaatcccagctacttggaaggctgaggcatgagaatcacttgacaactgggaagatggaggttgcagtgagccgagatcgcaccactgcactccaggctgggtgacagagcgagactctgtctaaaaaaaaaaaaatcgcccaaaatgacagaaagtgttttaatctaccttaatttgtttttttttttttttttggaacgaagtaacattcaattaattattttaaagaagctttccagtttttctgtctcctttcttctaaattgaagagttctgataattactcagattagtttgccaggatcttatttttttgagtcaacagtatgttttattacatacctcatgtatttccacacttgcctgcagttgtctgtgtgtgaatccgtatggtaggtatgaagctgtgtttttgacttgctggttttgtctttctgtttctggtaaaggcatgtgacattgttgagctgttcattcattcatccactcaacaaatgcttacttcatagaataacagaactctttaattcctcttttttatgtgctgggtacacaaaacctgaacagatattcgtgtcctgagttcagtgtttagtgaaatggtgaaatggacaagcagttattcatagtactattagtattaccatctggtatattttggccctgtgtccatacccaaatctcatgttaaattgtaatccccagttttgagggaggggcctggttggaggtgattggatcatgggcgtggattccccccttgatgttctcgtgacagtgagtgagttatcacaggtctgattgtttgaaagggtgtggcacatcccccttcatgctctctcctattgccatgtgaagatgtgcctgcttcccattcacccttctgctgtgatagtaagttgccttaggcctctccagccatgtcccctgtatagcctgtggcactgtgagtcaattaaacctcttttctttataaactacccagtatcaggtagtttttttttttttttttttttttttttgagacagagtcttactctctcacccaggctggagtgcagtggcgtgatctcggctcactgcaacctctgcctcccaggttcaagcgattctcctgcctcagactcccaagcgattacaggcacaggccaccacgcccagctaatttttatatttttagtagagacagggttttgccatgtttaccaggctggtctcaaactcctgacttcaggtgatctgcccgccttggcctcccaaagtgctgggattacaggcgtgagccaccgtacctggcctcaggtagttctttatagcagtgtgagaacagactaatacaccatctcacagtattctctgtgtccccatcttgcagtgtgctttctggccctgtcttgcagcatcctccctgtccccatctcccagcatgctccctgtccccatctcacagcgtcctccctgtccccatctcccagcatgctccctgtccctgtctcccagcatgctccctgtccctgtctcccggcgtcctccctgtccccgtctcctggcatgctccctgtccctgtccctgtctggcagcatcctccctgtcctggtctcccagcgtcctccttatccccgtcttgtggtggtattgtgcagttctttggctgctgtttgccctgggtctgtttggagcctccctggagctggctgtgtgggcggtgctggcaccgtgatcagtaaagcagtccctgcgctcacactcttcccagggctcacagttggctgaggcttgtggagtcggggaggtgggtgagtggctggaggaggcagctggtactggagcagggccggttagggctggttcccacatgctgcctcagtcagcagaacaggttttctggtgaggcaggtggccccacgcagtgtggagctggtgcgtggcagaatcgggactgaaacctgcatgtctgcctctctctgctcgcttccctctcctttgaatttgcagttcagctctgaggcatgtgccatgggtatgctcttgcacctgaagtgtacacttttgtacagacacacgtggaaagggtgcacccgtgctgttgccatgccgtgtctctggggtgagatgtcctgaaaatcaggacagctccatcctgaacagcctgggccccatggttccggctgcgagcagcccgcctgtgcgcatgtgcacagaccaggagagacgccgggaaggctccactggctgtggactgcagccctgcccctgccttctgtgacaacggagtctggtctcctcctgcacagtcggaagccgccatccctcactctggagctccagctctcctggggagtggtggctgggaagggttaatagctcctggtgttgcctcaggtcctcgctcctttcagtcgttgattccctggaaaatgcccggtacctgcatcgttactgcataatgcagctgcgctatctttctgaaaatgtggggactgtcacagttgctgactttcctctgagggatgaactgatttgtgtctgtttcctcctgtgggacaggactctgtcatagctccctgtgcttaggcgggacaaggatttctggggtccttgctcgctttctggggttctcctttgaggaggagctggagttcttcctggggggtgtgatcatggcttagcatgggcagggatgaggaaccgcgacctgaggcctgtaagtgcttctgcatttcccacagactttccctgtatattggtgcccccctctttctcatgtagataagagatgagtcttaatcttcctctggagacctctgggagtgccatggtgacagagaggaccggctttgcctcttctaacatggaagcattgccccggtgaccagggtcctcgtcagtgaaaagactgatgtcacagaagggcagcgacagagcagctcgtttcctcccctggctaacgtcttagtttctcagctaagctgcgcggttctgcatctggttctgcatctgttttgattcgtgatagctttgttcctgcagcgcctctgattggtgacaactttgttcctgcagcccccccgcctgcaagtcctgttctcacctgtgctcagaatcaccagggtgcttggtcaacattcagattcccagccccactctaggctaactgagccttgatttcttccccgctgctcctgctctttcctccctcacccttctctcttcctttaatggtaaaaggacctagttgcccactgaagcatcacagggtagcctggcttcctttcgatgaggcctgatccagaggctccagcctgtcactaagcgtccctgactcgcatttctgtttcttactgtcttcagtgtgaacttcatcttcaggggtcctgtatttttagggtacatccctagatggtctgccatacttggaaattctttaattgtttttttccagctttcaagttcagatctaacatacaaagtgctctctgatattccccttttccctcactcttgaagaatcagtttgaccctgtatcagtctgttttcatgctgctgataaagacatacccgagacgggaaagaaaaagaggtttaatggactcacagttccacatggctggggaggcctcacaatcatggtggaaggcaaggaggagcaagtcacatcttacgtggatggcggcaggcaaagagagcttgtgcagggaaactccaccttataaaaccatcagatctcatgagacttattcactattaggagaacagcatgggaaagaactgcccccatgattcgattgtctcccaccaggttcgtcccacaacacatgggaattcaagatgagatttgggtggggacatagtcaaaccatatcacaccctcaggtctgttggtgtattaggccattcttgcattgctatgtagaaatacccgagactgggtaattcatgaagaaaagaggtttcatggttctgcaggccatacaggaagcatggctctggcatctgcttctgcgacggcctcaggaagcttccagtcacggtggaaggcgaagtgggagcaggcacatcacatggcgagggcgggagcaaagagtgagggggagtgccacatgcttcaatggccagatatcagaagaactcgctatcatgaagacagcacccagccatgaggcatctgtccccaggatctaaacacctcctaaccaggccctgcctccagcactggggattacaattcaacatgagatttcgaaagggacaaatttccaaactatgtcaggtgacattcctgcaagtgttcagctggaagggctctttgggtttgaggagaaatttatgatttttgtccaaggtttttgagtcctgatctctcctacaaacagcttctatcgtcttttctgtgaagtctttccttttctgcccccttttcaattcctgagctggaactaattgatgccttttctctagtcttgtctgtctttgtgtatgcatgcctctaaaataagtcttcatgttataggattcctgttacttctattgtgtatttatttttctccaaattccttgacaccttgcgatccctgacacatattgtgaggccaaggaccattcactgctgtgtcctttcgatgcctggtgctgagcaggttgttggatggatgtattttaaggaaagtcacaaacttttgtaagaattagttctactgcagcaaatatactcacttttcacaagtaaaccttgtgatgttctattgggcatctattacattttcagacaaacattggctttctgtctagagaagtcacgctatccagaaaccccatgcctggccatccacttccgggattttgctgcaaattccatcagattccctggtgtccatatcaacgagcattgggtcaaaacccacagccagtttcgtctatcccaccagagtcacaaggagtcaatgcccagaatctcccatgggccctgctgccgcccttgggccagctcccgagtggtggccctcccgcatgggcctatgctcggtttgtggggtgtagggggtgggcagggtgtctgtcactacttcggatgaacaaaacatgctgggagaagtggtgtggactctggatcatagggtttccccagtcatctgtttcataagggtttccttaacgcatttctctggcacggtggtggtggtggtggtggttttcactggacttctgtaccaagagcaagtcatatgtgtgcaccagtataaaccaagagaaagattaacatggtgccctatttccctcttctgtgtgcaccaagctagatctagggaaagataagcgtggtgccccggggccgcattcccttcctacatgtgcatccgtgtaaagagaaacagaagtgtagtgccacggtgccacctcccactgtgcactttcttttttattttcttctgtgaattgtaccccactttgctttctgagaattttggtctcactatatatatacatatttttcttactttttctttttttttttccagacagagtctcgctctattgcctaggctggagtgccgtggtgtgacctcagcttactaaaacctctgcctcccagtttcaagtgattctcctgcctcggcctcctgaatagcggggatcacaggcgtgcaccaccatgcccggctaatttttatatttttagtagagacggggtttcaccgtgttggccaggctagtcttgaactcctgacctcaggtgatccacccacctcaccatctcaggtgatccacagtcccaaagtgctggggttataggtgtgagccactgcacctggcctggtctcaatatattgattatgccccaataattttttttttatagagttctacttgtatctttctgatttttagagtgagaggcagctccccactggaaggaagagccggtacttcagccccgttctctgctaccagaagcagctggtggcattccagtgacccagttaggttccagcctcccccgcagcccttgaccacgcactgcacaggctgtgtcactttctgcacagttctgagcaacgtgcttctggggcacagggagcttctggaatgtggagtcttttttctctcccactgccgagtgtactgtttgggcttcatgggcaagggctattaataccctatgctttaattgcctaagagagaagtattaatatgtttagggaaatgctggttattgtatggggctcataagcactggaaaaagagttattaagtatgttagattttccagtgcttatgggcctggcctggccaatatgatgaaaccctgtctctactaaaaatacaaaaattagctgggcgtggtggtgcctgcctgtagttgcaactactcaggaggctgaggcaggagaatcatttgaactggggaggtggaggttgcagtgagccgagatcgcaccactggactccagcctgggagacagagtaagactctgtctcaaaaaaaaaaaaaaaaaaaaaaaaaagaaccagaaccagtatatgtttctattagaacaaagggatcttagagatgtagtttcctaaatgtacaaatgctgagaggggcccagatatacaaagagcccagaaagggttagtgacttgcccagggtcacacagccaggaatggcagaatccaaatgagaaaccaggtctcttgattggcaggtcacgttcatgtcagcactgagctgaagcgtgaagccgactagagtagaaactgtgttttcagagtcacatgctgtaaccaggggtaaagaaaagcagcgatatgggcccatggcttgttctgtccaggatctggtcacaggcagtattcagtattctgcataactcttaaggaattgccattgggcaggtgggttttagtcatggatgacgtggcagggacggtgtctcctgtcatctgcctggtggccgtcagggtgagagctggggggtttgccatcagcggccgagggaatctcctgcctctggggaagccattggatcattcactttccctaggcgggtgcctcttgattttttaatatccagtcttatttatatgtggtattttttgtttttatttttttctgtagagatgggatcttgccatgttgcccaggcttgtcttgacctcctgggctcaagccatcctcctcctgcctcagcgctgcaaagtgctgggatcacaagtgtgagccaccgtgcctggccctttttttgttttttcaattctcaagagtttttaaactttcagtttagaagcgcagatgaaatggacagtgcgatggcctcagctctgtactcagcagcctggccctgcagctctgtactcggtggcccggccccacagctctgtactcggcagcctggccctgggctgtggccacacagcatttctctccaagccccgattcttgcagaaaaggagggagaggtgattaagttcatcttcatggacttcctaatacatttttataactctttattctaaatctttacagtgtcacctatagccttagcccagcactggtaaaatcaactttaaaaattttaatgatgattcaaaatacatgagtttgatctttatcataaacgattaacacattaaaaaatccaatgtggcttgaaaagtttaaagtaacatttaagtactgctcacagggcgaccgcctttgcagacctgcctagctggtgttaatgggtctttcttttgggccctggtaatcttttgcactcaccttagttacggtgtttctttctcgcattgcttgttttcggagccggcctgtacctgcgtatgtttattcaacaaaacagttgtttatactttcaggtgagctgggtgtagggtggtgccctgagaacagagagttgaggtactggttcttccctccagctgggagctgcctctcactctggcttgctgccgccctgcagagtgcatccacagggcaggtggcggggcggcagagctcgcatgccaggaccaggggctcctgtaggcctggctgtgccgtgtctaactggaggagcccaggccctccactcttcaagcctcgatcttttcacctgtagattgtgattaatagtaatatattatagggctgttttaaggattaaggcactcaagtgtataaaatacttcacatagtgcctggtgcaatataaatttcagccattactttattttgctcatggtggttgatggcatcctgtttgaacagccccgagttaaaacagttcatgaagatgtgtacttgcactactctatgaatcaaccataaaataaggatatgtgggaaaatctcaagactcatcaggcttagcaatgaaggttaaagaccatttctattgcagtgtaccagattaggagacatgggcttgggaggaacatggatcccccctctgccctgtgcgtgctcgctggctggaagaggtgaacctagaggagatgcgtgcatccaggagctgagtcccattggaaagctgtgccttgtgtcttcacaagaaggaaaacagctttatgggaagaaaggcgggcccaggtggaggcaggagactgggagagagggtctgctgagacctgcagccaggccgaggggccagcttgggggccacgctgcactgtcctgaagagcccagaaagcccccggctgcgcctgctgccctggttcatttcaggggagcagatttgcaaagtagtacatttaagcgcatccctgttttcagtgctaatggatttcctgataagtaggaaatgtgaaaaatactgaggaacaaaaattccctagcaacacaaaaattacttctaatttgctatatcaccttgtggtctgtgttcctgtgtgatggtattatataatcacatgccattttatagcctgcttttaaaatgtaattctcttgtaacatttttggtattaataattgctcttaatcataacttttaaagctatgtaacatttcataatacactttttttgttcatttattctttggggcagatttcacaaaatcaaattattgtttcagtttcaacatttatgtagttcttatttacatattataacaaacataaaagaattggacaagttataatccggatcaattctatcatagaattccctgtattggttgccatcacttagaaaaagttggctaatataataaatattaattagtatgatgaaattctcatttttaaatttttgagtcattggttataataaagaataaattttcttcatgtatttgttactagtttttattctaatgcgtttctgcctgtaagatataactataacttaacatgcatccaagtgcacgcatccagaatgtgctactggggacatctttacacatgcattcactggttccccacgcccacgtaccccccacacacccatacccatgatgcacccacaccctcccacacacctcccacacgcctgcacctgcctcacacccacacatacatgcacattcacacccatgtacacccaccatagccatgtacccacagaccctcacacacacccttacatacacacctgcacctgcctcacactcacaccccctccacacacagctgcacctcccccacacccacacccgcacacatacatgcatagaccacgtacccatgctcccacacacgcactcccacgcacatacacgcatagtgtacccatgctcccacacacaggtgcacacctgcatgcacacatgcccacacccacgtgcacccgtgtcactgccatgaaggacaccccagcagacccctcagattcctggagtctgagccaactccaggcctgcggtgaatggtctctgtcgttacctcagttggttttgcctgaggtaatcgcacaaggtgctccttctcgtgtctgatttttctcactcagcattgtctgtgcgtgtgttgttgttacttgtcattactgtgagaattgcatttgtgaatataccacaactgatttacccattctattgtggagttttgttttgtttttttttttttttttttttttttgagacaggatctcactctgtcacccaggctggagtgcagtggcgtgatctcggctcactgcacctccccctccaggcttcaagtgattctcctgcctcagtcccccaagtagttgagattatagatgactgccactacgcccggctaatttttatatttttagtagagatggggtttcaccatattgtccaggctggtcttcaactcctgacctcaggtgatctacccatcttggcttcccaaagtgctgggattacagatgtcagccaccgcgcctggcctacccattctattgttgatggacatctgagctgtttgctgctttggctatcataaatatatctgccgtgaaaattcttgcacttgccttttctttggtgtttgtagggtctatccctaattgtagagatgtggcgtcatgggacacatgtgtttctgccaaatgtttttctcaatatcactaagtaatcatttaataactaataatatattataaaatgtgtaacaggtccacagaggaaaaaactgttcataagtaaactttccttgggtgtggaaaggaaaaagagtacaataaattttcacttataaaaacaagtgctgtgttcatttctctggttcttagatgtgtgatttgtaattggaagctgttcactgggaatgtttctgaacctgctgtggaaacttcagttccccgaatggagagggcgggcgcgcatgctccctgggctcctgctctgcctcgggcaagccggccatatctggcttctccttggccccaggacccggtgctggcggcccgctctactcctgggagattgtggttcagctcacatggctctgggcactggctgggtatgaattccactctgagcaagtccagaatgactccctggggtgaccttgtattagttcgttctcatattgctattaagaaatagctgatactgggtcattgataaagaacagaggttttattggctcacatttctggagctgttcaggaaacatagcagcatctgcttctggagaggcctcaggaaacttccaatcatggcggaaggcgaaaggggagcagccgcctcacatggccgaagcaggagctaggagagggaagatgccactcaaagtttttttgttgttgttgagacggagtctcgctctgtcgcccaggctggagtgcggtggcgccatctcggctcactgcaggctccgcctcccgggttcacgccattctcctgcctcagcctcccgagtagctgggactacaggtgcccgccaccacgcccggctaattttttgtatttttagtagagacggggtttcactgtggtggtcaggctggtctcaaattcctgacctcaggtgatccgcccgcctcggcctcccaaagtgctacaattacaggcgtgagccaccgcgcccagcccatgccactcacttttaaatgaccaggtctcaggagaattcactgtcgtgaggatggcaccaggtggggatggtgctaacccattcctgaaggcccatcccccatgatccagtcacctcccgccaggcctcacgtccgacactgggattacaatttgacgtgaggtttggacgggacacagatccaagccctatcagaccctgagaggagcagttggaaataatgaaagggccatctgaggcctgggtgatgtgtaggtgctactgggtatcgtggagacagtttaaaaatagcatttaatgttagattgcaaacgtattgcagagtgcgccaggcacagtcagtcccagacctagttaggcaaaaaatgttaaaagtgcaaataaagcacaaagaagtaaaggaaaaccacctataattccaccatccagacaccactcaggtacctacctgctggttctcatttggacacgcgtacatttttaaaacaaaacaaaacaaaaggatgtagcattcgtacagtttcttttgtgtattctcttctaaaacatatattacatcgttccatgccactgagtagtctacagtacaccaaatggcgtcacaatattaccatcaaatactgcaatttatttgaacagtttcctattactaaacatttaggtgacttctaattttttttatttcaataatcaatgccatagtaaacgtacttggatataaatcttttgtgtagacccatgaatattttcttagtacaaatttacttttaaaagaggaattatgttttctcattgacttgggtattggtaagaaattaaatgtgaaatcattttaattcctctaaaagttatcctggaaagcatggagatagtatatttaactttcttatagagtggctaaaatgttatcctatttaatatcataagataatagacaccaacggctgttggacttgtttttgaaaagaggataacagtgtgtgaatatacagccctttctcactctctcccaccttaatcatgtctgaagtatgagtcgagttctgcccactatagacagagtgggccaggcgtggtcagtcccagacctaattaggcagtcgtgccctgctgcgcctgccctccccagcagctgtgcagcaggctgggaggaccttgctgatatggacagccctgggcagctctggccgtgacaccaacagtggctcggtctaagagccacttgaggacacagcgtttggtgccttatttctttaagactggatatgaccggatggcagtcttacgtagcttgcaatcttagaaatgctccacagggattttctaacttgtctttggagaggagtccagtaagaattaaattatagaagcacatactgttggcataataacaattaactaaagatgtatctgtcacgaaatgtgcatgtgactattctttgtaatcatgatgtctgatgaaggtactgaggaaagtgtttgagatcctgatgtgctcttttcttgtatttgtagatccatatcatagattttgacgatgaaaacaacattataaataaaaatgtcctcctccatcaagcgggtgaaatctggcatattagcgctagccctgcagacagaggtgtgctgacgacctgctacaacagaagtaagtgcggcttttctaaggtacttgctaactggaggtaactggaggtatttcctaagacgggttttgtattgctaatgggtcgacacatgactgaaaagatttagccattaatgaaggtgttgcatgcacagagaagccatgatattgtgagtagatgtttgcagaaattattagaatcttgagattctaagaactgaagctggaatcagctgttctgagaacgttgaccccttgatcaggggagtacagtgctggagtttccggtgaggcagacacaagtgtcctgatgtggaaactgtacgttgtggggagcagcagggattcatctctttcctgtagtgtcttggtgactgtcttccagtgctctttggtaagagcagttccatgcacacacgcgcgttgactggtgatatgcctcataggcttcttcctgcccgccgttgtgctctctaggctcttggagctctgggaccttagtttgtgtcaatgcagatgtctgagttgctgaactgagccttcctcttccccagttctccttgtttggtcatcgtcaatgagtactttctaaattctggctctatggagaaatatctcctaggatctctttctctaccatgtaagccagaacaaattctttgtggtttttgatatatagtttctaaaatgttgccttcatttgtcccacaggctgaatgactttttaggtacttttaatgcattctgtctgatcttctctctcataccctggcttcagaatattgatgtgtagggattgcatggctcatatatcaagctggtcaccaggacatcccgatctaatattccactttcaccgggttctgtgtgtgtttcccttcccttttcccttcccttccctgttcccttcccttttcccttttcccatctctttcccttttcccttcccttttctcttcccttcccccttcccttctttttacccttttcccttctcttttcttttcccttcccttttcccttttcccttccctttcccttccttcttcctttcccttcccttttcccttcctttcccttttctcttcccttcccttcccttttcccttcccttcccttttcccttcccttcccttttcccttcccttcccttttcccttcccttcccttttcccttcccttcccttttcccttcctttcccttcccttcccttttcttttcttttccttttcttttcttttcctttccttttcttttccttttcttttcttgacagagtctcactctgtcgcccaggctggagtgcagtggtgcaatctgggctcactgcaacctctgcctcccaggttcaagcaattctcctgcctcagcctcccgagtagctgggattacaggtgcacatcaccatgccctgctaatttttatatttttagcagagatggggtttcaccatgttggccaggctggtctcgaacttttgacctcaggtgatccgcctgccttggcctcccaaagtgctaggattacagacgtgagccactgcgcccggcccttcttccactttaacttcacagctgccccatgtcctcctctgagggccctgccttccacatggagggcagcatggcatgtggctgagtgtggctatgcacctcctgccagcgggaggttgggggtccgagagcctccttgtgttttgtctgctctctgtgccgattggtccaagctgacagtgtctcagcagaaacacatttctcaagaatctgtgggtcttcagtagatttcctgaggcttcacttcctcagacaagagcataactgcagatcttttagagacgatctcttctctgccttggtctcctgctaagatggccaagggactgcccccttcatccttgacccttcaccctccccttcacccttcactctcttctgcctgaggatctgtgaggtgcttccttggcttcttgagaggcccttcctaggcctgcactctgacttcctgatcttcccgaggctttaaccacatgcagtgtggcccgtcctcggccttttcttaggggcacactctcctgacagtcggggtattagtccattctcgcactgctgtgaagaactacctgggactgggtaatttatgaagaggtttaatggactcacagttctgcgggcttaacaggaagcatgactgggcggcctcaggaaacgcacaatcacagtggggggtgacggaagccagggccttcttcacaaggcagcaggagagagagagcaaagtgggaagagccacacaccttcaaacaaccagatcttactgtcacaagaacagcaagggggaaatccaccctgtgatccagtcatctcccaccaggttcctccctggacatgtggggattacaattcgagatgagatttgggtggggacacagacccaaaccacatcagttaggcttttcatctcagcaccttttgccggctggagacgctgtgcttgttgttactccaccatcgtataactcttccccgtttgccctctcctccacccttgccctgtccccccaccaggaaacccccctcgtgcaggaccagcctcagcacaacaggagctgcctccatggtcctgcagggcatggcctttctgcaccctggatattccaggcaagctctgctttttctgtggctcctcaaaagcctcccagcctctacccactgccaaaatccagagctcctcccgcatttcaggcagttgttactgcggccccggcttccatagtcattatacactgcagaggaattcccacaaacagcggcttccaacagcgcatgcctcttcaacagtgtgtactggctgtagcttcgtagcgcactggcctggggtctccaggcccccaccaggctgtgtcagggctctcgcctcatgtggctcctggggttgtaggatgcaggcttgtttcctggctgtccgctgggaccaccctcagctgctcccagctgtaagtgggctttgagttaagctgccaagtttgtggcaatttgtagaagcaacagaaaactaaaacaattgccaagcactcttggtcttgttggtcgtccacaggtgtaagttgattgtgtccttcaagttaccctggatctcgtgatttccagtcgtggcttccagagactgactctttctgccagactttgaaggcagcatagatcttctgttaagtatttccctaatctgtcagcctctcaaggaagaaagacgaaattgttccacaacattcatgtctaagttccaagaattctattttattcctgccatagcagaactgagatttacatcccacagggaaggctgttttccagtgtgaaatgctgcaagttcctgctctgatcaggaaagagcagcacagctgcttgactcgtgcttaacctggctcttcgcccttcgaagcacacacggcgccacgtctcatctgaatcaggtcatctgcagcagtggtcgcacccgtggggcaaggcgccaggccctcctgcttcaggtgcctccggaaaagcctggagtcacagacctaagcttgctgtgcataacgcagggcagggaaaacattctagagacttcatgtgttttgcaaacatacttgtgctctgtagtttttgcccttagctcacctgtaaatcactaggcttccacattgccatgaatcatatatgaattaaatccagaagcaccacagacttagattagacggcattgcttaaatcatcacttcgttataacaaatctctttgtaaagatcagagttgcaatttatcctctttgtcttccagtagtgttttctcctattgtgcttttaccctgccggtgcctgggctggtgggaggcatcttgcggcgtttcctgtgtgtgtgccgtttgttaggggtgcttatagagaagctcctgttgtctgctgtacttggagacccacgtgtgttttctttgttgttgctcttttgtagccccttccttctttttgtttccattagtttgtgtgatattttggtgaacggtggcatcttttaatgaagaggctgagggcttctgagacacacctttcggcgcacaccctgcgtggggcagccagtgtggacagtagaaccgcacgtggagagggcaggccgatcacagggccagctggcgtgagttgttaggagcaccctccttccgaaagacagttgccctcttctaaagctgctttccgtgtctttcttcacagatgtcctaaaatcctttttcatgattttttttttttttttttttggaggtagggtcttgctcttggctcttgtcacccagtctggagtgcagtggcacaatcttggctcactgcaacctccacctcccaggctcaagcaatcctcccatctcagtctctcaactagctgggaccacaggtatgcactaccatatctggctgatttttaaaaaaatttctagtagagatgaggtctcactgtgttgccaggctggtcttgaactcctgagctcaaatgatctacccgcttcaccctcccaaagcactgggattacagctgtgagccaccacacctggccttccatggatcttatcttatggggaggaaaggagacgcagccatggagaaggggcctctgaggagggtgtctagaaacagagttcatttggagggcccggctcttctttaggacgtggctattggttatttgtcagaagcaacagcgtttacattttatctgtttattgtgccacactgaatctctgcaaatcagtggaagtctgcagtgtggtagaattcttgtgcacgcaagcacatgctagaatgaacatcacaaatatgcagaagtggctgagctcgtgacttattttttaaaatgcaagcgagaaaccctttctctgtacccttactattcttaagaagggtggtcaggaatgtcagtgttgagctccccgtgcacagctgaaggatctggcgcccacaggcagtctccttgaagagtgatgttctcttcacactgtcttagaaaatgatagaaaatttgcatgaggttaaagtatcttaaaaagtcaaacattttcagattaaacccatacatccatctctcctagcttaaatctctattcatgcaaggaacaagtgacagattgccatcgattactgatagggatttataactgctgttgatctgttttcagttattacctgtgatgattgtgaaaaagacattcttggagttggtggaagggggagttgtagcacaataaactcatggaacgttttctatatagatgatgaagatttaaaaaagaacttgaactctcctttctgataatttgataagaaaaatgcatctccatgaaagcaaaatgagggactgtgcccagggtagaagctgtctcgacaggactgtacatacttggaacaggagagatctcaacagtaactggtctgtgggcgtagattgtgggttggacatggctgtggggatggtggcaggtggcaggctggcctccgaggaggacgcaggcctccacacacagcaaataacagcacaaccttcaggtctcaattggacctggagccctgagaggctgtggtgttgccacctggaagaagcctggtcacgcagggaattagcatgagtgacatatttctcttggggtttctcccttcggagctgccgggtacttccagtcacctccctccccaatttgtgtgcacttcagaatgtgctgccagcaggccttgacctttccgtgcatctcactttccatatttagaacttgtttcacccacggttttcttaaggttcattgagaaaaaagcgtatgtttcagataaacattaaaaaaccccaactttgctgcttttatttctaatgtatgtttctgaattagggtacaccacgtgggcctgcctctgctgacaccatctcatgagtgtatacacacctgcctctgctgacaccatctcatgagtgtatacacacctgcctctgctgacaccatctcatgagtgtatacacacctgcctctgctgacaccatctcatgagtgtatacacacctgcctctgctgacaccatctcatgagtgtatacacacctgcctctgctgacaccatctcatgagtgtatacacacctgcctctgctcacaccatctcatgagtgtatacacacctgcctctgctcacaccatctcatgagtgtatacacacctgcctctgctcacaccatctcatgagtgtatacacacctgcctctgctcacaccatctcatgagtgtatacacacctgcctctgctgacaccatctcatgagtgtatacacacctgcctctgctgacaccatctcatgagtgtatacacacctgcctctgctgacaccatctcatgagtgtatacacacctgcctctgctcacaccatctcatgagtgtatacacacctgcctctgctgacaccatctcatgagtgtatacacacctgcctctgctgacaccatctcatgagtgtatacacacctgcctctgctgacaccatctcatgagtgtatacacacctgcctctgctgacaccatctcatgagtgtatacacacctgcctctgctcacaccatctcatgagtgtatacacacctgcctctgctcacaccatctcatgagtgtatacacacctgcctctgctcacaccatctcatgagtgtatacacacctgcctctgctgaaaccatctcatgagtgtatacacacctgcctctgctcacaccatctcatgagtgtgtacacacctgcctctgctgacacatctcatgagtgtatacacacctgcctctgctcacaccatatgagtgtacacctgcctctgctcacaccatctcatgagtgtgcacacgcctgcttctgctcacaccacctcaggagtgtgtgcctgcctctgctcacaccatctcatgagtgtgtgcccatctttgctcatgtgtctcatgagtgtacacatgcctgcctctgctcacaccacctcatgagtgtgtgcacctgtctgctcacaccatctcgtgagtgtacatgcgcttgcctctgctcacaccatctcacgagtgtacacttgccagtctctgcttacaccgtctcatgagtgtgtgcacctgtctctgcttacaccgtctcatgagtgtgtgcacctgtctctgctcacaccatctcgagtgtacacgtgcctgtctctgctcacaccattctcgtgagtgtacatgcgcttgcctctgctcacaccatctcacgagtgtacacgtgcctacctctgctcacactgtctcatgagtgtgcatgtacctgcctccgtttacactgtctcatgtgtgtgcacctgccttttctcacactgtcttatgagtgtgtgctcctgcctccactcacaccatctcacgagtgcatacctgcctctgctcacactgtctcgtgagtgtgcgcattcctacctctgctcacactgtctcctgggtgggtgtgtctgcctcttctcacactgtttcatgagtgtgtgcctgcctctgctcacaccatcctcggcgacactctgtgtggtggcctctcaatcaacagagggcaccagtggtctggctctgtgtcccccttgctctggaccttccattgtgtccccttttgtgtctttgtgaccgtgtcctaacttgatctgttatactagtgcaagccattttgaaaactttcatccacttctcttgctgctctctaaatattttcacagacttttacaccttgcttgaaaaacatgtttgcagagtgaaactaactcctgcatttagctgaggttatacgtattgagtggtggtcactccagagcactttgtgggtttctatagaaaaacaagaatggaatttagttcctcactcctaaacttcaggaattcgccgaggggaaccttgtcaatatctaaggacctctgacccaggaagcccaggctggtgccgcaagatcattagagaatggtcatggaactgtcatctgggggagcccaggctggcacctcgagatcattagagcatggtgggtagacctgtgatccaggggagtccaggctagtaccctgagatcattatactgtggtatgtggactgatccaagggagcccaggctggtgccccgaggtcattagagagtggtcatggaaccctcatctgggggagcccaggctggcaccctgagatcattagagcatggtgggtggactctgatgttggggaacccaggctaataccctgagatcattagagcatggcgagtagagcctgatgcaggggagcccaggctggtgccctgagatcattagagcatgataggtgaactctgattcaggggagccaggctggcactcggagattattagagcatggtgggtagatctgtgatctagaggagtccaggctagtaccctgagatcattagagtgtggtaggtggactgatccaaggaagcccaggctggcaccccgagatcattagagtgtggcgggtgggctctgattcaggggagcctggctggaacctcgagatcattagagcatggtgggtagacctgtgatccaggggagtccgggctagtaccccgagatcattagagtgtggtaggtggactgatccaaggaagcccaggctggcatcccgagatcattagagcgtggtgggtgggctctgattcaggggagcccagctggtgccctgagatcattagagtgtggtgggtagagtctgatccaggggagcccagctggtgccctgagatcactagagcctggtgggtgggctctgattcaggggagcccagctggtgccctgagatcattagagcctggtgggtgggctctgattcaggggagcccaggctggtgccctgagatcattagagcgtggtgggtgggctctgattcaggggagcctggctggtgccctgagatcattagagcgtggtgggtgggctctgattcagggagcccaggctggcaccctgagatcattagaacgtggtgggtgggctctgattcaggggagcctggctggtgccctgagatcattagagcgtggtaggtgggctctgattcaggggagcccaggctggcaccccgagatcattagagtgtggtgggtgggctctgattcaggggagcccagctggtgccctgagatcattagagcgtggtgggtgggctctgattcaggggagcctggctggtgccctgagatcattagagtgtggtgggtgggctctgattcaggggagcccagctggtgccctgagatcattagagcgtggtgggtgggctctgattcaggggagcctggctggtgccctgagatcattagagcgtggtgggtgggctctgatccaggggagcccagctggcaccctgagatcattagagcgtggtgggtagagtctgatccaggggagcccaggctggcaccctgagatcattagagcgtggtgggtgggctctgattcaggggagcctggctggcaccgagatcattagagcttggtgggtgggctctgattcaggggaacccaggctggcaccctgagatcattagagcgtggtggatgggctctgattcaggggagcctggctggcaccctgagatcattagagtgtggtgggtgggctctgatccagggaacccaggctgacccctctagagcattaaacgtggtggaccccatgtgatgagcaggccataggggtggcaccccccaggtggaaatggtccttagagagggatctctcagtgtgaggcagactcatgtgcttcccgtctgaggtagtctgctgtgacaggtgtgagcacggatgtttggacctggaggtctgagttccagggaacggtgccaacacatgagcttcccacggctccccaggtgccatccctctgcctttgtgcctttctatggctctggcccactccccaccctctcttgtctacacatcgggagctcttttttacccttagaaatggagaccaaggtgggtagattgcttgagcccaggagttcaagaccagtctgggcaacacgagaagatgcagtgacccgtgattgtgccactgcactccagcctgggtgacagagttagaccctatctcaaaaagaaaaaaaaaatacaggatagttcatctgtggagtttaacaacaaaacgagttgagtatacagagattgagaataaaaccatggttacatggttaaggaaggggcactgggaactgtaggtctgaggatgcaaagtagcaggtatgttggatggagaaggccagaggcctcatttacagcagggctgttgttgattatcttctatcatatttgggattttcactaaatgagtggattgtagctactcttgccacagaaaaagagaatgagcaactgtgtgagctgatggatatgttaattcgcttcactatagtgaccttttctctctatctcagcatcatgttgcagaccttaagtatagacaataaaatttttttaaaaatggaaaagggccagcgcagtgactcacacctgttatcccagcactatgggaggccaaggcggacagatcacttgaggtcaggagctcgagacaagcctggccaacatggtgaaaccccatctctactaaaaatacaaaaattagccgggtgtggtggtgcgtgcctgtagtcccagctactcgagaggctgaggcaggagaatcgcttgaccccgggaggtggcggttgcagtaggctgagatcatgccactgcactccagcctgggcgacaggatgagactgtctcaaaaaataaatgaaatgacatgacatgacatctatggcatatccaccgcctcctgaaggccccgctctaccctagctccccggggtcccaccccatctcccggcccctgtgtggccgtttctgccagagcacttgtctccctgtttcctgtctcgcctgctgactggaagcccccggcaggcctggacgcggctgcctgcctctgtgccaagcaccctggcctgcagaggccacgcagcttcggccgctcatcctggcaccatcttcctctgaaacatgactccgtttgagggatcagccattttgctacatcatagctgctcagaacatagtgacagactgaatcgactaatttgaactatgttgaaattatcatctcagtgagatttaggaagatacagtggatttttcttgggaacaaggctgctgaggtgtactgaataaatcagtaggaggaaacgtaagagaatgacaactgagcagctaaattcctctgggtctgcatccttaggtactgcagtgtcctggaagtgaaatgtgtgtgacgcggaatgggttcttccccctttctctgtctcgcttcttctgtcacaccctggacatgagaacttagcacactccagggaggcgtttgtgaatgagtgagacccactgtcaggttgtactgaaaaattaaaaaggggagctagatgtaaagtggtccaggtattttcccagcctttcttttacctccttaggtgggcatggtgggagcagggcagtggaggctggggaggcagcggtcttgcaggggtatcgggcagtggagagggcaccagatttggtggctggaaaacctagactctctgcttttccctctgctgcttaccggctctccaatcccggaccagtcaagtaacctctggagcgttcatctgtaaaatgggcacagttgactaacaccgctgttaaataatgagaaaacatgaggctgctgtgaacaggtttgtctcagagttggatctatgtaccctgcaaggacgggactccagggatgtgtgcaaacagtcctgagcagtgggctctgagcatctagagcacaccttatgcccagtccagggcaccttaccccttacccccaggagaggggggcagtgctgcagccatagcctcctctgcactggggagcagccgcctcaggagcccctggcacaggcaacaaagcccactggaagcattgggccagcccaggagtctatccgccctcacggctcactgaccgagccttcccttccatgatgggagcttcttaagcagggcacagcacctccaggggtgggtggcagggtgccaggggcacctgaagccacaggataagggtggtgcgtctttctgtagtgttacttctatttgattttgagtaatgaaaacatgatttatagcctgaaatgaatgtagatatgttacaaagtagaatgcaaactgtgcggtaatctctcaagtgaaacatgaggcttgtggagggtcccttcagagaaggtccccaggccctgttatgcaaacacgtagcagtgtgtaaaggatgctgtcacagtaggatatgctttctctttcctctgccattggtgtggctccctgaagacaaggacagaagctctgttttcgggggttgggagtagggagggtggcacagggaaggttttgtgctgaaatgggccctttcactgggcggccctcgagtggaaggtggcccgccccagcttcctgtcaccgcttcactgtcttgactttcctttgccaaatccaaagggccacagtggacaggatgctggtcctctctgaagaccccacctccttttcacctcatctcctccgcagtgggagaattcccattctcacaacctggagatgcacctcccactgtacctgtgagcatcaggcgtgctctgcacaggctcgctgcacagggccccacgctggggacacctcttggggctgctcagtgatgcaggatgatatttggggtggtcctgaccgccggcccttgcagggagcccagagcttggccttctcgtcaactttcctttttgggcccagttgtagctctgtctccctgggaaccagagaggggcagtgctctagcaggtcactaggcagggttgcttatgataaaagacagaactgatcaggcagttgtgtctggacttaggactctgaccctaaacccctggaggccgttctttggccttgctgagggtggcggtcctgccagattgtgggaacctggaagcgctgcttttcaggttgttacagctcctgtgaggcgtgaggccctaaaaccaaggcgccactgaccccagcctggtgagggtcaggccctccccccgaggtgctggaggcgcggcagcggccacttcggaagtctgagcgcgcaggccgcctgcactccccccggcgtgaccggggcccacgaggctggatcctggggatcttccagcgggcctcctgcctactgcatcatcccactgaccagagttgaggacgtcctgagagactgattattagagtgacgagtggtcacgaaatgcttcacaaacaagtggtgccctgggcagggtcggctttcagaaggtgccgccttgagcgggtgggtggccaggggctgccctaagcctgagttagcatcatgggagaatccccccaggacagacagctgcccgaagctgcagggcccgtatgtggccacggcctgggagtccagcctggagggcagcatcctgcatcctgaggagcagcagtgggcacacggagcgacactgtctaagcactgggccactgcccgggaggagctgggaaagccaggtgggtgccgggaatggtgcagcctcgtgtgctgctcatcatgggctctgtgggtgtccctgcaggggccgttaatcatgtccccaggggcagtgagctgtctcgggtgggtcctgcgctccaggggctggggacctgctctggctttcacagtgccacatgtcgctcgtgcagtgcctggggaggaggtgctcctgtctctgagcctcagtcttctcatctgtaagatgggaggaattccgtctgccttgactactttagactttgttgggattcagagaaggccgtgtgcataacatgcttttgttatgtgatttcttaaatcgttgttctgtcccgtcattgttttcacactggcgctgtgaattcagttttcctacatgtctgggccttgactctgaaccttccaagagtgttcagcctcacccttgctgcctactccaacacggcagcagcggagcacccctgcctccgccagcagggcccagtgctgcctgtgccacgcactgtgctgcctccttatgcagatgggttcatttagccccgtgatactaagcagcagacactgttggaaatcccagcttttcagatgagaaaacagggttcatagaggttgcctggaggctggattcaaacctgggcccatccagactctgctctgggtgtcttcacgtcttgccaccatagctcccagactctccctcacatggtaattctctgtaagggactttaaaggcactcctcaggaggaggctgctcacgtggcttggttcatggaggctgacaacacggcgaacgttggctgagggcccatgtccatcgtggacctgtgccccgaggccacaaggagaaaatgcagaatgaagaccttgtcgcgtgcagggctcggaggaaacttaaggaactctttaccctcatcagtgaaggagactaaaaatatgaacagatgaagggcatggatgtcctcatggtgtcagatttgtcgtaggaagccggggatactgggggcagttccccaaacctttcaggcagataccacccccacatcacctttggtgtccctgccagaagcctcgttcctggctggggggaccactggtttaaccggggattccacgtcttgagcctaaaacctttaatttctggtcttctgacacgcctatatggaatcattgcaaatatggaatgaaattttataatttttatcatcctgagagattatcctcttcagtgactaggttttttttttttaaagaaaaaatcagagagaggaactgtaatataagattagcttatctgccaatttctgaatctccggaaagagccagaggttatgaagactttaatgtttttgcattttcgtaacgtttgtcgcttttcgcttatatattggctgtggcgacagggacacctcgcacgtacgccaaggcatcccagccagatcacccactcgcttcggcagctgcgggagggacggtgctgatgggacagggccctgccttaagctccctagtgagcactggcctggggacttcccactttgctgatgaaggaactggagcattgtgagtgactttctcaaggccacctgcgcagtgcaagggcggatttgggattccggctttgagctctgcctccaggctgtgctgtcttcaccggaccctgtggcctctctgttcagccaaaggcagatgtgtgtgcgagggactctgtcaatggaattcatcccaaggctgctcaccaagttagggcgtccacagtcagtgctggatgaggaagaccacaggattgcaacttaggagacttaagttttgccgtgattttgccaaaaatcagtcctgtaatctctgacacctgaactttgtaggttccatttttgtcatctgcaagaaaggaaacttaaccgtggttacggctaagacccttttctatttcctgctctagacattcattgtcatttgcctttttgaaaacattttttgagcttttgttgtgatcgagacaaaacagtaagtactcaggacagagagatgagaagactcagtcccaaactccaggcacccaccatctaatggggcagacatgagcgacacagccagtgtgtcctggtcagctagtgcagtttcaacgctgctttagggtcctcaccgtgaccatcacctcaccgtgaccgtcagccctaaagccaaggcaccacggaggccctgccaggggaggaccgtgctgacctcgctgggaagagcggatttcagaatcccactctggctcctgatccgacagtggaatatgccctgggcccaggtctttggacatcttcccgtgaagtgagggtggaattcaccaccgatccctcggataagatgctgtcgagaattggcttttggaatccttcattgtgaagagcagcctgtatcatttgagctcatgcgtggctgtgggcagcgtggcctttgtggagatttccactgctgaggagtccgtggatgaggcagcgtctgtgccttctgttcactgggagtgatgtctgatgtgcccgcctggtccaggacgtgctttttaagctgtagaaagaaggtgctgaactagagggttcctgagatttcttttagcttcgaggtctggaggctctctgctcatagtgaaaactgtatcctcctctacagattaacaagaaagtcaagatacaatggttcttgtttaaagatgcattttccccttgatctctgcaccaaatgagaagaaagttgcatttttgagtggttactttgcattgtgaaaataagctgagagaagaagtgggttttcgctggaaaatagtattcttagtctcctctttgtgaaaccagaattctgagagaaaatgaccgagagccctttgaaagaatggagtacgtgagaggtggggagaaaagttggaatccatcagcctcatcgtcaagtgcctgcttaaagacggggcggcgggggcagaggacgctctgctgcactcaagatgctgatacatttctcaagcatgccggcttgtgtgtctccggttaaagtttccttcccattttctgtgcagatgttaaaagattgactcctttccttttttcagggtataggtgctcagctgggaaaggtgagagttaaattttctcatgatgctggtgccaagaaatagcaccttgaaaagagaaagaaatcaagacatgatctccagggagctgtcgtttggagcacattcccgagagctctccctgggccgggaggctgcgtggtgtcgttcccctcagcagcatgcttcaggtggagcctcctgccctgttcagatatgttagataaaaacaccttgacagtgccagcccgtctttaattttcacaccatctcaagtaaaatatgttttgaaatgaaaacattttgcattttattttaagcttatttttggggctctaattttttttaagactaacaaaaacagagtcaggtgacctatcttctctggaatagccgtgcactaaccaaattgtcagctgaagagggttttgctttggaggcataagcccagacaggtctgaagttgagtgtatctgctgaattaacaacagaaagggtttcttttggtcctttttcttttgggattcctatggaaatagttcactggggtcactttggtgagagagaggaaaacagcatgaaatatcaattcacctgagttctgtttgttgtgatttcagggaacaagttattatttcagttcaatgatacttcctttagggtgtgggttgctaagtcttatttaccataaactgtgagtttcattgctgcctggtctaataaatagttcatttgttagtgataaatgttaacatagcctagcaaagagagcgtctgtgccctcccaccttagtgcaagaagaggaagcagagttgctgggggctgcctctgggactttgtatgcaggacctggagcacacaggtgcagtgttgtccgcaggtgtggtgttttcctgcccgcaggtgcggtgttgcccacaggtgtcgtgctgtctgcaggtgcggtgttgtcctgcccgcaggtgtggtgtcatccgcaggtatagtgttgtctgcaggtgtggtgttgccctgcctgcaggtgtggtgttggctgcaggtgtgttatccccaggtatggtgttgccctgcctgcaggtgcgggtcacccataggtgcggtgttgcctgcaggggtggtgttgcccgcaggggtggtgttgcccccaggggcggtgttgccctgcctgcaggtgcggtgttgcccgcaggtgtgatattgctctgcctgcaggggtggtgttgcccgcaggtgcagtattgctctgcctcaggggtggtgttgcccgcaggtgtggtattgctctgcctcaggggtggtgttgcccgcaggggtggtgttgcccgcaggtgcagtattgccctgcccacaggtgcggtgttgtccacaggtgcggtgttgtccacaggggtggtgttgcccgcaggggtggtgttgcccacaggtgcagtattgccctgcctgcaggtgcggtgttgcccgcaggggtggtgttgcccgcaggtgcagtattgccctgcctgcaggtgcggtgttgcccgcaggtgtggtattgctctgcctgcaggggtggtgttgcctgcaggggtggtgttgcccgcaggtgcagtgttgtttgctggagggaggaagagcacaccgggcgtggtggacagaacagcctcgactgtagccggtacttgggcatggagagtgataaggaaacctcagaagactggagcttgggccccaactccactactcgtggtgggtccttgggcaggtcatgtacggtttttggcttccatcattttcatcatccttattttatacatgaggtaacgggataacgaagatgaccgtgaagatgatgacaatgacagctcccatcgagtgctcatgtgccaggcacggggatcggcgctttctgggaatgatcaagttgagtcctctgtgccattggccttttcccctgagggagttgttgcaatgacctgccgggccagcagcgctaattaggagcacacagcgcacttccagagcacctgacctacagctacaaggcttcaaggatgctgcttctgaggcacagattttgtaaatacgccttgttgtataaacatgttttcttcttgctggtttttgtcacgcaggatggagatgtaactattgtctcagagtgacatttgtaatgacgctcaagcactggagtttagaagccaatgagattaaatatcttaaacacttttctcctttctgtctttagaagtaaaattagatgttatggacccaactattttgttgctggggtaagttccaagtatctgaattccttcttgtctttttaggagacatcatagaatcgtttggcattcttcctgtagctcagagtcccacgattgtctttgtaaacacgttgcaccaggtcttcttcaggggacaggtcgcaggtgagctcaaaggtgtttatgtaaacaagcacccctcctgagtttggggtgcatgtgtggcgatcgaggagtagcacgtcaccagatgtattttggcttcagagtttggaacggtgtgtgaggagaactctgattgccgggacagagctgagcattgcagaatgagagtcctggttctggatatgaaggacgtgaatagcaaggggcttcagacagtagggagcacctgtgttttttgtttagttgtgttatggaaatgaggcatggctctggaatagtgggccattttttcgaggccgactcctgtgttgtttcttgcgttcctcactgactcttcagatcccgtttgtatcatctctctgtcctcattgactttctgtagcacctccaaattcagtgtcatctggcagtggaattaatgtgctgtttatggctccttccagatcactaatgaagatgtgaaataagacttggtccctggagcagcccacgacggctcctcacggcgtcctgctctatcatttgccgggtgctttgtttatggcccttcctccaggtttcagcccacgagggggtgcttagacaaagcccaatttgaattaatttttccagtaagactgtaaagaaccggggccagcttctccctcaaccccacatgtgtggtgtgctgcgctcttctgcggcctgctggtctgcgccctgcccttggcccacagccgtttcgacatggcagcggttccacttggaggtgcagagaggagccgttaggagccacggctgtgcgcctgggacccagcaggaagcaggtgtgaccttgagatgatgccccgtccgaagtgctgtgcatcccgttaggcaggtgctgagcccgtgtctcgggcagcctggacggctgaagcagaacactgtgaactgggtggcccaggcaacagaagttaatttcctcccgggtctggaggctggagcttcagggtcaggcatggcagggctggtcctcctgaggctatgctctgggcctgccatcggtcccttctcaccgtggcatcatgtggcctctcctctgtgcacgtgcaaaccccacgtctctttctcttctcatagggacccaggacccacctgatgacctcctctaaccttagttacctccttagaggctctgtctccagtacagtcacactgggtctagggcttcagtgtatgaattaggcgggggaattgggggtggattcagtccatatagcttggagtcttcagtgtgtttatttaagtaaggtgggaggggcctctatctagactcgaccctcacagctgctgcgaggtcacctgcctgtcagcgcctcatgcgctcccggcactccgtgctccaccccgcatgtgaggcacacagtaggccctcagctcggtcagtgcctcatgcgctcccagggctccgtgctccaccctgcgtgcgaggcacacagtaggccctcagctcggtcagcaccttgtgcgctcctggggctccatgctccaccccgcgtgcgaggcacacagtaggccctcagctcggtcagcacctcgtgcgctcctggggctctgttctctacccggcatgcaaggcgcacagtaggtcctcagcttggtcagtgcctcatgtgctcctgggtctctgtgctccaccccatgtgcaaggcacacagtaggccctcagcttggtcagtgcctcatgcgctcctggggctctgtgctccaccccacatgcaaggcacacagtaggccctcagctcggtcagtgcgtcatgcgctcctggggctctgtgctccaccccatgtgcaaggtacactgtaggccctcagcttggtcagtgcttcatgtgctcctgggtctccatgctccaccccatgtgcaaggcacagaatcctcagctcacacatgcactatttctgtgcgtctgactcttggtggtacctgacagcacatggtctgttttcctgaggcattttgagtctctcactgttgggactgtgtctagactatggcaagaggttggcgtggctggggaaggtgtggaccaggtcagggggctgtgaggccaaggagcctggtggcctggctagcgtctgttctgcagccaactttgtggtttgttacttgaagttatctgtacagcaaccctttggggaaaaaagtagtaattacacagcttcattgtgaaaagtcaacgtgaagacagaaaaactgggtgaaagttgaaaagcaggaacttgaggaatgggtctcatagaacgtgtgagtgtggcctgtgagttgggagagaggcaggattctgtccaaatagtaatgaatttgcaacatcaggtataatggctgcctgtggattgcctcataggaagtttgtgtagaagtatgggacttaaatgtacctaatcaaggtctatttcaggcattaaataaataaataaatagataagtacttaagccaagctggtgtgccacagtggctttgcaaaaacatggtaaacagatggtgaggagattgttcctctgggcaggtgctgcagactccaagataaaagcatgagggtagaggggtcctgggtgtggtggagggggtgggagtggggatggtggtgatgatgataatggtggtggcgataacagtggtggaatgggggtagggactgggatggtgatggtgggagtgggtgtgggggtggtgatgatggtggtggtgatggtggtgggggtgtgtatggggatggtggtgaggatggtggtgggggtgtgtatggggatggtggtgaggatggtggtgggggtgtgtatggggatggtggtgatggtggtggtagggggtgtggatggggatggtggtgatggtggtggtaggggctgtggatggggatggtggtgatggtggtggtagggggtgtggatggggatggtggtgatggtggtggtagggggtgtggatggggatggtggtgatggtggtggtagggggtgtggatggggatggtggtgatggtggtggtagggggtgtgtatggggatggtggtgaggatggtggtagggggtgtgtatggggatggtggtgatggtggtagggggtgtgtatggggatggtggtgatggtggtggtagggggtgtggatggggatggtggtgatggtggtggtagggggtgtggatggggatggtggtgatggtggtggtagggggtgtggatgggggatggtggtgatggtggtggtaggggctgtggatggggatggtggtgatggtggtggtagggggtgtggatggggatggtggtgatggtggtggtagggggtgtggatggggatggtggtgatggtggtggtagggggtgtggatggggatggtggtgatggtggtggtaggggctgtggatggggatggtggtgatggtggtggtagggggtgtggatggggatggtggtgatggtggtggtagggggtgtggatggggatggtggtgatggtggtggtagggggtgtggatggggatggtggtgatggtggtggtagggggtgtgtatggggatggtggtgaggatggtggtagggggtgtgtatggggatggtggtgatggtggtggtagggggtgtgtatggggatggtggtgatggtggtggtagggggtgtggatggggatggtggtgatggtggtggtagggggtggtgatgatggtaggcatgggggcgatgctagtgatgatgatggtggtgtggacggaggtggtgaagacagtgatatggatggcggtggtgatgactgtggtggggtacaggtgttgggggcgggtggcgggtgatggtggggacatgtgagtaagtgcagcacgaggggatgcagtttgccggagagcagcagcagaagatgctgtgtggacaccgccagggcagggccttgccagggaggcctcagggtgaccagcactcttgttgctggtcctgagagtgagcggcaggtcaccaggcagagcccgtggggcacaactcaggcctaggtgagagcatccgcaggtgcatgcagcttgttggtccagtgcggctgaggcaggtcctggggagaggctagctggaggctgggggagagagctttctgcaggcagtcagaggggcatcggagcctagaaccagaggagtcccaggatcaggtgtgtccttcagaaggtcccagggggattgggaggggacacaagagagggacggcaacaggctggccggtgagtgagaccaccgagggccctgagcccagctcctgctcctcttctgcctgtcacagaaatgcttgtcaccctgtggtcttggaaagatagtctttacgaagaaaagccaagtacagtgaaaatatgaaaatcctcaacatactggtgaaatttcaggaagaccaaaaaagagagtatagccttaaaaataataaatgtccacccatgatggagaataaatgtaaaatgatgtggcaaagattgataaattaggactgtgaagcctgctgtataattgggaactggcttagctcgagcaagccctggcctcaggaaagggggctgagtggcagctggcattagcggcagccggaatcaatctcctgcctctgtacttgggaacgagcgtcccacgttagaactgggatgaatttttcagcagaggaaggtgaaatgtcaggaagactgtagatcacgctggcgcagagtcctcgggaaattagagccatgaaaagctgccagcgcggcgccccaatgacatatggccagcgtgtgtgctctgcatccgccgatgttgctccccgggtggtgctctccggggagctagcgtgagaggggggctgggtcagctagtgccaccctccccgggtcccagcggctcagggccattgacccaggcccgcagctcggggacagccccggctgctgctgtgacccgctgctaatgaagaccggggggtgagggtcagatgcacataatgagccctcttgcctctgccttcctcgccctccctgatccgaatcctgttttttccttcatttctgcccaggccccagcttgggccttgagtttctcatgggaacaaagacagtttgactcctacagtgacttttctgaaacccagatccaaacacttactgtgcatctcagaagctagggcgataaagcccaggctccttactatgctcctgacagtggggagagctgaaaatggctataaatttaggcagatggggattttcaccctggtcccagcatttattacccctgaggccttcagcaatttgtggaccttctcgaagcccgtttatgtccacataaatgggaataatacttgtgggagtccagcgagtgttcagtgcccattcacctggaggactgggctctgtgtcctactgtgagctggccccaagccaccttttgacctcgtctcctgccatgcctgtccacagtgctcaggtctgtgcgccttgaacccccccacccacttttttaactctcaggcggcattttgtgctgctctctcagccttcgatcttcttcctccaggtctctgcctctcagaatccatgtcctctcccagggatcaggtgatatccaattgggtcctcactgcctttaaccctctcagcacccctttcacctcacatgagactttgtgtctaaggggtgggtggctgtctggcccccagtgggaagaagtgcagccctcatcgcagctttggcactgtggactctgagttggaggcagtcacccagcctcattgggtcactgggtctccttgaggctgataggtaatatacgtcctgtacctttcttgtagatttgtgttgaagctgaggtgcgaagtgtgcatcggaagtagggttgtcagataaaacacaggatatcctgttaaacttgaatttcaggtaaataaggagtagttttcagtgtcagtcagtcctgtgccaagtttttatttctcaatctggtgacccttatcagtgggtgtacctccatatgaggctttgttaggtagcatccattccagaatgaggcccacagcggtggtcaggccatgacgtgctcatgtcacagaccagcagaggcagacaaagcaacgtaaccatcaagaaccttctcaagcctggggcaccaaagatctcgttgaagggaccagtggaggctcttccccaccccgccgttatcccctgagcacagaggcagtggcatcgtgggtccttctccctgcaaagctttacctgcaaagctagggataaaacttcaattttaagagaccagaaacatgctgacaatgatgagcaggtgctgagtggtgggagggagccttgggaggaccatgggaacctggagatggaatattggacagggtgtattttggaggcagtgagagaagtcccatcatggggtctgaaaaatgaactttgcccctcagacgtgagtctcatccccacagcaggcacacagaaccttccagggactgtctttgccaggaaactcaattttatgccacagccgcctaaaaagcagtgcaaccttagcctccgttgaccaagctgtggtcagtgggatggcgggtaaaacgtcagagcacacccggaatgcggcctcagtggccataggcagagcagacagatggggactgatgtggctgcaggtcactccatgtgcagagtgatggacagattcggggggcaacttgaggaaatttgggagcgtcccgagactcatcttcaggcacttcagttatcagacagaggggataactgtgtgttgtggctccaacacacagttatcttgggtcaatgaaagctatagggtggagggtgtcatttgtatgtcagcacgagagtgaccgccaggtccttatgtggttctgtgcgctgttccaaagaaggccaggtccaggttcccgcaggattcagcagaggctggggacaaccccgacactgcacagggaccccagtgccccaagactggagcttcatgccccaggtgactggagctcccctcccacctctggtgccccagagtagagcccccccgcccagcaccccgcgaatggagccccccaccacagcatcctgcgagtggagccccctgcaccctgggactggagctgccgcccacacctcgtgactggaggcccctggcgccctgtgactggacccctagccctgtactctgcagacaccacctcatgccctcctgattctgaacgagggatggtgggtgagacaggagttagtagggagaatgtctggcctgtcttaagcctcaacattttttgaactaaatgaatagaagaaaaagaaactgttgtaagagaatgccacatgttctcagatttaaaatatgccactgccttctatatgttctaagtgtgaaaaaagcaagtccttgaccttatgggacttgcttgtagctgccccctcacccccataaaaatcatgcagaattactttctaaaaatatttttttttaatgtgaaaagaaatcatttctggaatctcaaaagatacaaaactactaattattgtatatttgaaaatcacatatttctaggaagagatcatcttgagagtgtgtaacaggaccaaggagaagaaaattctgtgggctttttctggtctatcaaatagtaaagcttagaaggtggaggcacttgtgttgatagagaccgttctacctgtgcacatactaggcctaagtaagtagtaaccttgtctttgcttgccagttttcaaagcactcttcaagctattgcaatgtgatatttctggtaatcgtctgagagtgggcatcttcatatgctccatttttgtaaacaagaaaataggaagttcagagacattggtttgctcggggtcttgtacgtaaaatttcagaatcaagtttcaagaaaaatttattttttacccagcaattatttcccctaacatatgggaaactgggctaatttgtttatttgaaaaaaaaattgattgatttgggggaatcataaaatatttatcagtgtaacaaagtttagtatataaaataattttaaatatttgtataccattgagacatagcatacacaagtacaactgtaccctgaagattcttgcgttaaatataaatataaggcagtcttactacaaagtttagataagtttttagttttaaattatcaagactttttttttttttttttttttttgagacggagtctggctctgtcgcccaggctggagtgcagtggcgggatctcggctcactgcaagctccgcctcccgggttcacgccattctcctgcctcagcctcccaagtagctgggactacaggcgcccgccactacgcccggctaattttttgtatttttagtagagacggggtttcaccgttttagccaggatggtctcagtctcctgaccttgtgatccgcccacctcggcctcccaaagtgctgggattacaggcgtgagccaccgcgcccggccaattatcaagacttttaaaagcctttgagaacttactggtatttcttctctccctaagaaaaatattaaaaaggaagatttttataatacccttagtatctatttcctgttgtttggaaaccatttgtcgtcttcagaacggatagctatttgctgtagtcaatcttgggtgactgtggaaacattgttttctgaccttggcgctgaaccaagcatgcactcctaatatataaacaactttccagctcctttttctctaacagagtgtggtgaccttgccgtgggcacataacctcaggggctgttcttgcttgtgtggggtagtggctgtgttctggtgtctgcagtggggagacgcgaatattccagtttggagcagcgcagggagcgtccctgccctgtgcgtacacgggcactgccagagcctgcacacctgtgcgtacacaggggcgctgccagagcctgcagggagaatcctacccacaccaccgtctctttcctaacccccagctctgctgcctctctcccacatgattacctcctttgaacaggtagtaaggggggtgttagaacagaaggaggtgtggaccggtctcttcaaccttcactcccatcgggaagcatctgtcgttttggggtctcaagtcagtgaccctggtcctggtcgagcgccggccattttcatgccctccactcccacctccctcgcccactgtttttcctttcccgggatgctctgggttttgggaggtgggattttttgtagactgcataggccgtatggagctgggttgtgtgtttatgtgcgtgtgtttattccctctgccaatctctgtcttgtcattggtatactgagactactgacctctaaattattgatctcttagggcttaactccgccatgttgttatttgttttctgttctctttgtttctcatcgttctgtttctctttcaccttcctgagttatgtgaacgttttttaatactccattttgatttagttacagtgtttttgaatatacaactctgtagaggtgctttgatgcttgctctagatattacaatatacgtatgtcacttaccaaacccacagttattggcattttcctacctcgagaggaatagaggagccccacttccatcgaggccatctctgccctcccactttaagaatataattgtcttaagtgttttctctctgtacattgaccatcagatgtggtggtgtaattttttcgccaaccatcaaatatggtttaagaagctcacgaggagaaagatgtctactgtatttactggtttttgcccattcgttgttcttttctttcagaagttctaagccttttttcattataatttctttccgtttgaaaaattttctttatccatcctttgagggtaggtctgcttgtggcaaacttccttagttttcctccttttgaaaatatctttatttccctttcattcctaaggatacttgcagtgaatataaacttcaaggttgacaattctttgaaaaatggaaatatttgaaaaatattgttctgctttgttctggtctctggtttcgggtgagaacttggtgatccagtttgaatgaagagcagaggctgctttcaattttcgttcttgtctttagttttcagaagtctaatcgtgccatgtcttggaatagctttcttggggtgtatgctacttgagattttctcaggctcttgaatctgtaggcaacgtccttcaccaaattcgaggactctctgtccattattcccacaaatgcttttcaacctcactttctcctctctggagactgaggccatctgctattgtcccgcattcctgaggctgttcatttttttttccgtctattttctctctggtctggtgttcaaattggacatttcctgttgttctgtctttaaatgttttctctgccatatttattgtgctgctattgaactcatccatttggttcttttttatatctttcatctctttgttgaaattttctgagtttttccctttatttgtttcaagagaagagtccctcatggaagcatctttatggcggctgctttaagatcatcctgtccattgactgtcttttctcattcaaattttgatttcctggttcatgggaaactctgggtcatatttcagtcaccctgtttaggtttggggactgggtcctggccttcttccacgggctgtgtttccagtggcagctgtcagagccccacagtctgtgcaagtgggcctcattctctgaggcctccgtggccacacacggccgacagcgtcggccagcgctggaatgttcttcctggggctggtgtggctctgttgtgtgtgggagacgccgagagcattcccaggcctgttctttttttaattgatatagcatagaggtacatattttggaggtacatgtgatattttgatacatgtatacaatgggtcatgatcaaataggatcatttgggataaccaaatggctaacatatctttcctttgtgttgggaacattacaattctcttctgctattctgaaatatacagtaaagttttgttaactctaattttcctactatactatcaaatactagaacttattccttccatataactatgtttataccattcaccagcttctcttcatccctgcctcacttcttttcccagcctctggtaacgggcagtctactctctccctccaggagaagtgcgttttagctggcacatgagcgagagtggggatgccgtctttccgtgcccgggctgctcctgaggctgtgcgcaggtagtgggcagggcggggctcttgtttcctggctgcctggtgctgctcctgcagaagtggggctgctggttctattgcacagagacagtctccataggcctgctttctggggccccagcatggtagggctcctgcatgaacactgtgccactgaggaagggaggcacccaccccaatgccctctacctctggcttggggccgggagacattagggcaggagccgctgggtccggggagacactggcaggagctgctgggtgagggctgggaggggctgtctggagtttttgacacatattggaatttgggctgggcacagtggctcacacctgtaatcccagcactttgggaggctgaggtaggcggatcatttgaggtcaggagtttgagaccagcctgtccaacatggtagaaccccatctctactaaaatacaaaaattagcagggtgtggtggcaggcgcctgtaatcccatctactcaggaggctgagacaggagaatcacttgaacccaggagggggaggttgcagtgagcccggatcacgccactccagcctgggcaatagagcaagactccctccaaaaaaataaataaattaaaaaaaaaataaaaagattggagtttgaaaccgtatatttatgtacatcctaaatagcaaatataggaaaaggagttctcttttttgactctataactatacagtacagttgactttgaacaacatgggtttggactgggggggtccacttacgcatggattttcttctgcctctgctgcccctgaggcagcaagaccaacacctcctcttcctcctcctcagtctgctcagtgtgaagacgacaggatgaagagctttatgatgatcccacttccacttaatgaatagtcaatatattttctcttccttatgatcttcctaaaaatgttttcttttctctagctacttaattataacaatatagtctgtaatacatttgtcatacaaaatatgttaatctactatttatgttagtacagcttctgggcaacagtgggctattagtagttaagtttttggggagccaaaagttacacacagatttttcagttgtgttggggtttggtgcccctaaactgtgtgttgtttatggcccaaccgtaatttcataaagaaaaccaaacttcttatgacaaaaagtaatatatgatatcaccaaaaacgagtgaccagggaataagttaaagaatcttagataatgaattctgcataaaacactaacctgggaaacagaaggggggaaaagagaacaaatccaaccaaatatccatagaaacccagaatgtgggaaaggtgtgtacagcgctgttcagaggagccaagggaaggggcggggcgggacccaggccaccgctagcatgacgaaatgatgacttcgggcctctgtccctcaggctgaatgcgtctgcgctgggtgcccatgcagctcaccccagtttcgtttttgtgtctgtcaataagttcagcacagtattgtttgtaaaaggcgtggctttacattgtagtgggctcagacccaagtgactgcctcggaactcagtagaaaggggggaagcagcgatttgaaattttcaggtcatagaattggcgtgatgatggtaatatgtaacaaggagtcatcttgtaggaaaatacagaataaataggaaagaaaggagaacagagcctatgaaccgcctgggaggaggtgagaatttatcagaaatggatatgacagacacttagaagactgtctggatatagacataaatgaaaggggtgagttgaaactgtcagatcactttcagcctggctgtgggagagattgtggcggtgtcgtcaatggtgagggcctttctggagggcgggcaggtccccctttgtctgtctttccccgtctcctgcacctgctcctccccagggttgtcaggtctgtgaaggtggccccagtccgttactcaatgggggcacaggacaggagtggagggctgaactggacggcagtggagggttgaactggatgggagtggagggttgaactggacaggagtggagggctgaactgacgggagtggagggttgaactggacgggattggagggctgaacaggacgggagtggaaggttgaactagatgggattggagggttgaactggacgggagtggagggctgaactgatgggactggagggctgaacgggatggaagtggagggctgaactggacgggagtggagggttgaactggacgggactggagggctgaactggacgggagtggagggctgaactgtacgggagtggaaggttgaactggacgggattggagggctgaacaggacgggagtggaaggttgaactggatgggattggagggttgaactggacgggagtggagggctgaactgatgggactggagggctgaactggacgggagtggagggctgaactggttgggagtggagggttgaactggacgggagtggagggttgaactggacgggagtggagggttgaactggacaggagtggagggttgaactggacgggagtggagggttgaactggacgggagtggagagttgaactggacgggattggagggctgaactggacgggactggagggttgaactggacgggattggagggttgaactggacgggaatggagggctgaactggatggcagtggagggctgaactggacgggactggagggctgaactggacgggagtggagggctgaattggacgggactggatggctgaactggacgggactggagggctgaactggacaggagtggagggctgaattggacgggactgaagggctgaattggacgggagtggagggttgaacaggacgggagtggagggctgaactggacgggactggagggctgaactggacgggagtggagggctgaattggacgggagtggaaggttgaactggacgggattggagggctgaacaggacgggagtggaaggttgaactggatgggattggagggttgaactggacgggagtggagggctgaactgatgggactggagggctgaactggacgggagtggagggctgaattggacgggactgaagggctgaattggacgggagtggagggttgaacaggacgggagtggagggctgaactgcaggtgtcaggatcacatagtcttggttgctggatgtggagcagaaccatgtcttctgatgaggttgcctgggtgattctgagaaacgctgggaaccctggacactttgttcctcagccctggccatctcaactccgatctcgccagaccacctccccgcgcacagcacgctgttccctggatctctgcagccttgcgtggcgctccgtggggtcttgggaagatcatctctgtggcttcaccgctgcctgtccgcgtgcctgggcgtttccagcccttcagatggatcctttctgtgtgaacttggtgaccgtgtctgtcttcctacatcagagtcagcaaatcacacagtggggattttgtaacaggaaatcttttcaaaccatgcaacaagtactgtaaatcggagatttgagtgatagggttttatgagaatcttcattattcaacccaaattatatgactgtataagatttttaacagtcttcctttgacagcgattgactctttggggttatactctgtctgttatggctggtcagcctgctgtgattcccggtcctcccagcacccgatggatcccgccgtctgccagcagagggcgaagcttcccgggcgcagaggccgcaccgtatcacgtgtcgtctattgtgttcacggtgccgggaaacactcagaagtcaggttgccggcgtctggcgggtttgtggctgctccttatctttggagtagtcttcctgtgcttggggaaatttcctaggttattagtcgcatttcccaatatgaaaataagaaatctattttccagtttcgctgtgacccgactctgctggcctgagcatttgggtgagactgattcagacgtggcagcgtgaggggacagtgggggctgccactgctgctgtgagtggcggtcgaggtggcagcagtgccggtgacttccaggtggtggtcggtccctggcacgcagcagcctaaggcagcagcagagctgtggggtggcttcctttgtgctggatgggggccgcagagactcccctgctgggccatggccctggtgaggctccgagcttggcccccagaggctccccttagcctggccctcggcatggctggtgagagtgagctgcctggcacccctccccttccacccagcccctcacgttgatctccttttctgcttaatcagccggagccagcttttgtgaattgcaactaaaagtgcagcaaatacacgtgacgttgggctgtgtaagtccccaggctggggatggttacataggtggacacaagggcactggctgtcaccacaactgagtgcagctgtgagccagcgccactgtcacttttcagcggtcttcatatttaatctccacaactcttgagtcacaatttcagttttacagatgaaaaaaacggagtcagatttcgtgtccctgctgtggctgcccaggccctccctcctgctgaccttggccctggagcttctgcccttttcctctgttctgttctcagtattgatccctctctgctgcatgccagacgccctgctggagcgccccgagctcagccatgcagacacggctggcctggcctttgggagcctgtcgtctgatgggaagacagacacaaagcaagcagttcacccagagtgacagtgacaaggtggcgggggttccaggatgcagggagggctgtggatccgcagcgggcctgggcttctggcaatggccactgcaatggggcacaacctctggttccgcgacgtcacgtcactgccatcgctgtcttcatccggcctgtcgccatccaccaactgcactcaggatcagcttgctaaagcccagcagcagaaggagaagcagccaacagaaaagaactgggaggcaaagaaaggagagtgtggtgctgggaggatgagacagcatgagaaagccaaggacctggatttcagaagagggattgtcttctaattgcttgaaaccgcagtttgccactcaccacacgttttatttaaatttaaattttaattaattgttaacatttaaattttttgtagagacagggtcttgctgtgctgcccaggcttcaccagaaccacagaatatcaggcggtgactctgatcctgtgattcattagacattggcccagaggcaccctcgttaaactcaaagctgattgagtttaggaaatcaggggttttctttttgctgtatgccggaaagttttcaggtggctggatctggaaccccaagtcgctgagggagtattctatacacaggtttcttgaattcagttccactctggagattttcccactgctggcgtggcctcaggagccctgtaaaagagtcctgtgagcttctgctttatcgcatctggcagtctctccgccttcagagccctcatggtggtcctgtcaaatcctaactgatgcgctgctccgccttctggcctcctgacccttgttttagaagtgagaagcccagatgtgagttctaaatttgtttttattcccacgtgttcctgatagaaacacctaccacatctaacacctaagacattttaaatggtgggtttgagtatccacaggtatcaaagatgactaaccatcccttgccacttgtcactttatttttatcctactgtgttattttatcaccttgagactgtatttaatcagtctctgaaatgaaaataagaggtttgaggtgtcaaacaaatattataagaccagaaacacttttctcgtttggttttgtttttaacacagttcaggtatgtttggccaccattgtgggtacctgagtaagaactaattactcaataatgagcctggcccacttggaagaagaaagagcattgtctgacttagtgacctggcctgggagactcctcagtgttcagatggctgtcccctggcaggcacagggagtgaaggccagttctccttggagcattctctaacttagtgacctggcctgggagactcctcagtgttcagatggctgtcccctggcaggcacagggagtgaaggccagttctccttggagtccccgggacctgcctccatgcttgttgttgtgaaggggtcagaaagaagatgtgtgtttgttgccgtctactgcatctcacttggaactgagtcactcatcccggaagctgcatctgaaaagcaaggctcattgcggaatctcatgcagacacagaggaacttgcgtgcccgtgatgctgacctctgcttgtccaaagaaactgtcatttcccaaaacatttttggaacttttctttcagaaatgctctaaaagtcagcttcagtgccatctgagaaaatctctctgctgtgtttttgtaggatactttttggctcctgataatttagccctatgaatcatctttttcattcatcaggctggcctctgagatttttgactattttgagaactgtaccctgaaaaacaagatttctcctaatgaagaacacacagaagcctgtgctgttggaattggcactgtccggagttcacaggttcactcgctcactcgctgtttataacccatgacatatatactctcttgtagaaaacatgcctgggcgacagctggtttacaaacgcttttggaccattaggtatttgtatgattgggacatcgggacttcccagcatcatccagaaataagtgcattgtgtgtaccttcttgtttttgtttttggttgattctttttttttttcatggaaatggtattggcaagaaggctgtttgatagggtattagcgcgaaagcccatttgaccctgaagtacagccttgagaaacggacacattggagaggctgtgaggcaaggatgtggccgtggacatgcaggtggcattgaggcgagactgctgggagcccagtccaggctttttagggagcaatgatgaaggcactgtaagagcagaggaggggtgcttgcatcctgaagctgaggcactgacgagaaggagagggggcgggcctgtgtaaaggcatttagatagacctgtgctggaaagaccagaagccagccattcatatgtaatcactgtctaggtacaaaggagagtacatgtgttacaggggaaactgtcgttttaatggaccaaatagaattttggagttttgacatcttaaaactagttttccataatataggacattcattttgcaattgtgaaaactgggaggttaaaagtcttgtttgggatttcacagggttgaattatatgaaattgctgaaatttgaccctttttgacctataagaatggcagtttcatatggttcaaactattgatttagtgatccagccacagctgtctgcactggagtttgcgctttgccaggccaggctgcatacctcactggggaatcttagggtccctgtcaagaggcaccttggagaccaaatagtgtgactcttgcgtcataaatttgctgagtctgggctctgagcacttgagtgactggcccaggatcactcgactgtgagtggtggtgccgagactgggaacgagatccttttcactcactgcctagagaaccaagctttctacagactgtcaagagagggaatgcagcttggtgaatgacatcttagggacgtataagattgcatgtaaactgccaggttgtctgtcttccgtgatttggcaaaacctaagaagagcttacatagcttacacgtatggccataactcaaagtgtgtgtgtgtgtgtgtgtgtgtgtgtgtgtgtgagagagagagagagagagagaaaatattttcctttctgaaatttaaaacatacaaatgggaatttcagcaggctatagtgtcaaagtcaatagtatgatttgcccattaaaacaaaaagccaatctaatccaaggactctcttttcctaagagaaggagatattcgtaacaaggccgcgcccagtcagatcacatccatgtggcatccagctctcagaatgccatcagcagagccccaagcagagtcgctgggacaatgagctgacccagggccgagcactgcaggacaaggggccaggacagtgagctgacccagggccgagcacggcaggacggggggccaggacaatgagctgacccagggcggagcactccaggacagggggcagtccatggaggctcacgcgggaggccctgtggagagacagacacagcgacattctcagcaacagctaggacttgtgatgaatcttggcttcctgaagtccagaactcaccctggtcatctcattacttttgaaaaatgagaacccccattttaaatgtttgaggctttttggcctcattaatagtgctatggtggggctttcctgtatctgtggggctgttaagcgggagaggactggaccttctctttctgatcccagggcaaagatctgagcgcagtgagcaggagcggggtaggtaagggagaagttaacaccgagtcagacgatgtcccctggaaggctgggcttgacgtctgcagctgtcccagagctgtacgtgtcttctcccaggaagcatttgtgccgacactggaatgccttcttatggggggtgagtcttctgacagtggttggatagagtgtggttgggggttccttccctcatggagagcccgagcaccttagagaacacggcccctctttggctgctgtcaatccttgtgtggagcatttctgaatactgagtgagctcttggtataggagatcaagaacccacgacatcttctcgggggaggacaccggaatttgcttgttgagatctgaggacactcagccaggggaggatcattattacagaaccaatttaccaacaccatcgagatcgtaagatcctagatactatcaggatgactttggaggccataactcccttctgattaattttatctctttcaagggcatgacgacagacaagatgggtccaggggaagcaatagatgtaatctgacactagcaagacttggattctctcccacacaacccagccatcaataaaacggcagtatctaggccagaccagtggctttcaaatcttgttttaaagctaccgaacccattttcacaagtgacaaggaaccccaatatataagcctgtaatagacatataaataaaaccccggtatgtgaaacgggtaagagtggggctgcagtggcagaaggagtgggccgcacgaatctcaagcctttctctgctaacaagcatctgttaagggaatgaagggaaaatacaataaatagagcaggaaatgtatagcattatccatgagtcccaactgtctgagatggcagatcttttggtgatgaccccctctctgacccataggctcaaaagtgcctggcacatagtaggcactgagaaagtatttgttgaatgtagtgaatgagcaaatgaacaaagggtttctcctaaatctccttaaaaagcaagacaaagctgaacccgggaggcagatcttgcagtgagctgagatggagccactgcactccagcctggatgacagaacgagactccatctcaaacaaacgaacaaaaaaagaagcaagacaaagcttttcatggtctaggagaggggccaggaaaccacagccacagctaattctggcccactacctggttttgtgaataaagttttattggcacccagacacactcgcttatttctgtaatgtctgtggctgattttgctctacagagtaactgcgataaagactgtgtggcctgcaaagccaaaaatatttatgacctggccctttacagaaaaagtttgccgtcccttggactagaatgcaagggagaacctggctgtttcccctgggcatgaggctgaactgggaggtagaacctcgtagctcaactcttctgaaactggttgaactccgttgtagaagggactttgaaaatctgctcatctacagcccttatttaactgttagggcaaatgcccaccatctgctgagccctgtgcttaccacttgcctcaccagcggtgtaagatgtgaatggctgtctctgcatgctgcaggtgaggcaggtgtggctgaaacactcacttcatgccactcagccttcttttatactccactgaaacatcagcctttcctcgcccccaccctctttattccgtagtcggattccatcgatgctgttttcacagtgtcccacacgcctctttcttttgtggtcaccagatacatgctgagctcctagcatgtgccacactgtcccaaatgctggagccacagacacaattaagcccacctaatccctgccacccaggagctcatggacaaaaggaagtgattctggtacagagagaaactgccaccacctgcctgccggatgggtgccgggagaagtagatggcttccaggctaggcaggagaacaagattagctcttaattggaaacccctaaggaaacaagtcagagactcggagagacttggtcctagacagctgaggttgaagaaaggtcagagccctggtttcacctgtgaggacaaagatgcccagagctggatgggcagtgtgtgggtgcagagaggacaggctggatggacagtgtgtgtgcagagagggaacaatctgtgtgtgtagagaggataggctggatggagggtgtgtgtgtgtagggaggatgggctggatggattctgtaggcagagagaggacgggctggatggagggtgtgtgtgtagacgggatgggctggatggaggtgtgtatgtgtgtagagaggatgggctggatggagggtgtatgtgtagagaggatgggctggatggagtgtgtgtgtgtatacagaggatggactggatggagggtgtgtgtgtagagaggatgggctggttggagggtgtgtgtggagaggatgggttggatggagggtgtgtgtgtggagagaggatgggctggatggagggtgtgtgtttgcagagggggtgagctggatggagggtgtgtgtgtgcagagagaggatgggctggatggagggtgtgtgtgtgtagagagagaacgggctggatggagggtgtgtgtgtgtagagaggatgggctggatggagggtgtctgtgtgtggtgaggatgggctggatggagggtgtctgtgtgtggtgaggatgggctggatggagggtgtctgtgtagagaggatgggctggatggagggtgtatgtgtgcagggagaggaggggctggatggagggtgtgtgtgtgcagagaggatgggctggatggagggtgtgtgtgtagagaggatgggctggatggagggtgtgtgtgcagagagaggagggctgcatggagggtgtgtgtgagtagagaggatgggctggatggagggtgtgtagagagaggatgggctggatggagggtgtgtgtgcagagagaggatgggctggatggagggtgtgtgtgtgcaaggagaggatgggctggatggagggtgtgtaaagagagaatgggctggatggagggtgtgtgcagagagaggatgggctggatggagggtgtgtgtgtgcagggagaggatgggctggatggagggcgtgtttgtagagaggatgggctggatggagggtgtgtgtgcagagagaggacgggctggatggagggtgtgtgtatgtagagaggatgggcttgatggagggtgtgcagagagaggagggctgcatggagggtgtgtgtgagtagagaggacgggctggatggagggtgtgtgtatgtagagaggatgggcttgatggagggtgtgcagagagaggagggctggatggagggtgtgtgtgtggagagaggatgggctggatggagggtgtgtgtggagagacgatgggctggatggagggtgtatgtgtgcagagaggatgggctggatggagggtgtgtagagagaggatgggctggatggagggtgtgtgtgtgcagagaggatgggctggatggagggtgtgtgtgtagagaggatagcctggatggagggtgtgtagagagaggatgggctggatggaaggtgtgtgtgtgtagagaggatgggctggatggagggtgtgtgtggagagaggacgggctggatggagggtgtgtgtggagagaggacgggctggatggagggtgtatgtgtggagagaggacgggctggatggagggtgtgtgtgtgtagagaggacaagctatatggagggtgtgtgtgtgtagaaaggacatgccggatggaggttgtgcatggagagaggatgggctggatggagggtgtatgtgtggaaagaggatgggctggatggaggtgtgtgtggagagagaatggcctggatggagggtgtatgtgtgcagagagtatgggctggatggagggtgtgtgtgtgtgtgtgtagagaggatgggctggatggagggtgtgtgtgtgtgtgtagagaggatgggctggatggcgggtgtgtgtgcagggagagaatgggctggatggagggcatgtgtatagagagaggttggctggatggagggtatgtggagagaggatgggctggatggagggtgtgtggagagaggatgggctggatggagggtgtgtatgtagagagaggatgggctggatggaaggcatgtgtatagagagaggatggctggatggagggtgtgtgtagagaggatgggctggatggagggtgtgtgtagagaggacgggctggatggagggtgtgtgtttggagagaggatgggctggatggagggtgtgtgtggagagaggatggcctggatggagggtgtatgtgtgcagaggatcggctggatggagggtgtgtgtagagaggatcggctggatggagggtgtgtgcagagaggatcggctggatggagggtgtgtgtgtgtagggaggatgggctggatggagggtgtgtgtttggagagaggatgggctggatggagggtgtgtgtgtgtggagaggatgggctgggtggagggtgtgtgtggagagaggatggcctggatagagggtgtatgtgtgcagagaagatcggctggatggagggtgtgtgcagagaggatcggctggatggagggtgtgtgtgtgtagggaggatgggctggatggagggtgtgtgtttgaacatcagttcaaggacacaggtcaaagccaggtcacgagtcagctaagctggttgaaagcagtcacatggttataattattcctcctgtgggattctcctaatgaacaatattacttctacacaataagattatcatttatgactttaaatgtatttgttaaatggttatacataattttttgtttactgattttgaaaagttcaagaatgaaaacattatttgcactttggatatcatcaaagaattgtttaggttcatatttgttaaagtgtttggagtctgtggtgttcaaatagccaccattccatttaattaaatttaaggaagaaaaatctttctttttgaataatgtgtggtttctgtagcttcacagaacattaaaggacatgtttagacattaacgtgttcggcgacagacaaattcaaaattgtctgtgatcaagttgaagatgacttgatcattgccttaaaataataacaggctgcctctgcgtcctggggtgggtctcacctgcagcatattaagagagtttacctgctgctgtggccacctgcatccaacagctgtcgggaccattcctttcctgaaaacccgggaggactgtcaccacatgcgtccagagtgatggggagaagtggagcagaggttaaggggctgaggtgcccgtggggactggtccagtcgtggctgatgggcccgtctttgaagcaggtcttctgtgtgctgttttgcagcctaaacggctgtctgggtgccaggaccctcctgagcagtccgggttctccctggggcatgcagctttgccatgagagaaaaagcaggccacatctgattggtccaggccctccccacgcatggactcacaggctatagcagcatttccctctgtcttccaccacgcccctcctgaagtcttccaagggcctcctggaggagccactgacccagtaaagatgccctttcctgagcctgctaggaaaggtgtcctgggaacccggttagagtgctgcaggccggctcaaggggaggccctcatctgtgctagaatgttgctgagttaagctcaactcaccgagcaagccatgccaccaggctatagattgtagggtgatagtttgtcgagattgttctgtgatggaatgaaaggaaacagaggaagactcgtaggctggcagaggacttgggagaatgcacatgggtgcagaagagctcaggcctgggccagtgtctgcccagaaaggcttcatgggaccggggtagcagggcttatttcgtttaatgtggaaaaggaacgttctctctccctttctcgttttctgcaaatgacagtcttttttggacctagccactaaggtttatatttagttttagttttttttttttttcaaaacatttttgctctctgtctcatatctcattattttcagtaacagttgaattcattataaagaaatcaacattattttaatcttccacatagtactggcatcatcttggcagaagttgccgtaatgtagatgagagctttttggtggtggtcacctgttcatcacatgaggctgcgtgccttggaggcagcacagacgtcagcatcagacatacctggatttgagttccggctctggcacggaggctgtatggccttggggaggtctcttaggcttagactcattcctcataaaagagggacagcagcacctatctggagatcgctctggggattaaggagaggtacttgtgaggtgcgcagagccggctgtctgtgaggtacggggggctgtccccgcaacagcatggtgagcatgggggaagtatgtgggcctgttgtgaggtgcacagagccggctgtctgtgaggtgtggggggctgtccccccaacagcgtggtgagcatgggggaagtatctggggcctgtagggctcacggtcttttttgtacgagtatcttatgaaggggcacttgaagatgataaaccattaacataaatgatgggtcagccacttaatggactgggtcccagtctggccgcgcagtcacctgaggacttagggaaagttccagtgctgcaggcctcaccttgacccagaatatttcccaacagggccccagatgttagtaggttcattcctgagtgatgttagcatggagccagaatggaaaactcttcaaccttcctcacagagcagagcatgtgtggcaggagggttcagtggacataggctgccatgtggccccgtggcgagcacgtgtgcatggtgcccctggagtggatggcccagcggggcccctgacggccacaggaccaggacacagacaggcttggggctgacagcatccagctgtgccacctgctgtgacattgccatggtcatgcgaaggtgaccaacttacctttacataacattgtgtttctccaagaaaatcaggaaaacggcactaaggttgatatttgagaactttggtttgctctttataaagtgataacaataccatgatataaaaaggtaataacttccacgtctattatacagattaaatgagagaaaggatggaaagggcctgggtgagtttcttagccacactccctcacggcatcaccccagagaccacttgaatgtgttccctactcaagacaaatggatgcagattgaatttaaaaaccaattttttaggaggtatgctttatgtttagataaaactatcttttaaattatgacgtttttatgatataattttgatctatatcataatgtatttaacaactaaccatctctcttagactccttttgaaagcagatagttatgagttctaagtgttcagcacccagcatagtctaatatatggatttgggtacactgcagaactgtgcatgcagcccgctacgtgggttggggtacacggcagaactgtgcgtgcagcccgctacgtggattcgggtacacggcagaaccatgtactcttcatataggatgatagcccactttgtgctgatgtgtgtcctaattacaacagaattgaattcttgatctccagttgtgtgtgttgtgatgctgggtgtgcctgtagcttcattctgggtgttctcgccccacccccaggcatccctgctgctgtggggctaacatccagcctcgcatctgaggcatgttcctcggggtatcctcatcaatgccagccgtgggggaatctcttagggacttgggcagaagccaaattttagacccagtttacttcctaatcagaaaactgagggctggcccgtggaatgtgaagagtccatcccactctggcctctttctctcagtcctggcctggcctggagcaccacgagataaaatagattctctgtgttcctcttgcattgctcgggccgtgatggaagcgctgtctgtgtgtgctgacacatgcaatctgatggcaattagtgctggttgattcgcgaaagacccagatgaccgacggtccatttcatggggcctctcctgtcacagcaagtgcgctcagccccactgaagtggtcaggcacggctgcctgtgcagtgaggagaatgtggtcccttgctgccacacccccgccacctgcccccagcaccctcctctttagagagccatggcataccctaaattcatggccaaatgaattctacagatgcccaagtggcaagacccattacaaagactaagtctatttttttaaggaaaaatccctaaagaagtacaagctacagctgattgctgccaccacttcttcagggagaagatttttctcttgattatggcttaggttcctgggaacctttgactcccccagttccaacccttcctcacccaacccgctgtcacattttagtggtaaaataacatctttaaaaaggactcttccttttgtattcttttgtatttaaaaggtgttatgcatgtcataatcttttgtgtacttcatataacacgtcataattacgcatccaccatccttcgttgtgcatcttattctgctcccggcagcattctaggcctgggggctgcatccgggtgagcgagacgagccactgtcttgtgccacgcactgccctgtatgctgggcctgtagcacccaccagctacacaccttgcccttgtaacctgcaggcttgatgggggacagacaatgctaagtacaaaagaaaatgtgtaatttgtgcaatgggataaaggagaaacaagtggctgggaaggagatgccagccagggcttagccaggagctgtggcagggcccatcagagggcattgtgtggttctgtgagcgaccgtggcagctggaactgcggcactcaccctggaggccgtgacaaagggtgtagtggtcgtgatgagaggcgtggatcaaggtggggccagtatcttgtggcctgagcaagcatgtagcactgatgctgtctgttgagacgggaagccccgggaaggataaggctgggggccgctggcgttcagctttggacactaagtgtgaattgcgtatcatgtgtctactcgtctgctgaagctggtggctgtgggagcctgcgtcggggagatgagcatgggaaatgtgaattgggtgctgttgacacaccctacgggattcaaagccctggggctcattttagacatggtgcacatagggagacaggatcacggatggctctgggcatgcctcgtttacaagctgggagggagaccgagggaaccagcacagaagcggaaggccaggaggctggtgcagagtggggagcagggcatggctcccaggatcccgtggtccctcagttcggttttgggtctgccattgcccttctcccacagaggacgagactgttccttctgtcatttttgtaggcatttgagatccaacaacatactctgggtccctgggtcacacgccccatcctctgtctggacagagagaaaaccctgagctcggcgttctttgttttaaaactataatttggaggatcacccagagagaagagagagacagcgaaatgattgagaagaaagagacaggaagagcgagccctgagaggtccaggaagcaggcggcaaagaggtttgccaattaatacagaaacaaatcctcgcttgtctcccctctcccctgaaaccggtggggagatattaatagagcagttctgttgcctaggaagaaagcaaatgggcaattaaaactccagaaagctgagcagtgcgtgagcgtcatggatttgaaagcctgcattttaattgcgggagatacggccgtgcaggcacttggaggctgtgtgcggggtggggctccgctgggggcctgtggctgcccagggggccagggctgctggggcctgtgggcgttgccgaggccatcacctggccctcctacccatcccatgcaggaatggctggtgcaccagaatctggtttcatccccactcccactgtatcatggctgctgcgtgctgcgcgtctgtcctctgtcccaggccatgcgccatctgatgctgccatgtctgaccgtgcctgctgagcagtgtttcctggtcttgatggaaggttgggcttgtctcgggatcttcacgtttggcaaagtccagcagctgccaccctctgatgcccgaggaactgggaaggctgttgcttagcaacagattccaggccgcatctgccctgtaagggccacagtgacaccctggttttgtcctcagaagtgcttttcttcctggcttgtgttcttacatcattaataactgtcttttactctgccacctgtcagagaagcaaaagaactttccggacaccccagcagccccagccacgtgagactcatgttcagctgtaacgtggtatttcacatcacctccttgttcgccctgtggtcactttcgaagaacttggatagtttcaatgacaatttcctaaactgctagagtcccaaaacttgctttgggttcagtgtttcaatgaggtatgagggtggcctgcgttttggaagacctccaggctagcagagaggcagggcttggaaatagcacacctgcttccagagcagcatctgaagggtggcaggacaagcatgtgccaaggccccaggtggcggcgggagactgtggccctgccccacccgctgctctcatctgccatgacgccaccgcatcaggatgccaccccgtcaggatgcaccctgcgacaaccttacctacagcagactcgggccacggggaggagaggggaaccctgtgaggggccacgaggagctctcatggcaattaccccttagtgcaggcagcctactccttactcagtaccctctgcacacgaccttggcccctccaccgcctgggtacataggggctacagcatgccgaatgagctttctggagcatggtgaatgagctttctggagcatggtgaatgagctttctggagcatggtgaatgagctttctagagcatggtgaatgagctttctggagcatagtgaatgagctttctggagcatagtgaatgagctttctagagcgtggtgaacgagctttctggagcgtggtgaatgagctttctggagcgtggtgaacgcgctttccggattgtggtgaacgagctttccggagcgtggtgaacgaactttctggagcctgaatgaactttctggagcatggtgaacgtgctttctggagcgtggtgaacgcgctttctagattgtggtgaacgagctttctggagcgtggtgaacaaactttctggagtgtggtgaacgaactttctggagtgtggtgaacgagctttctggagtgtggtgaacgcgctttctggattgtgaacgagctttccggagcgtggtgaacacgctttctggattgtggtgaacaagctttctggagcgtagtgaacgagctttctggagcgcagtgaacgagctttctggagtgtggtgaacgagctttctggagtgtggtgaacgagctttctggagtgtggtgaatgagctttctggagtgtggtgaacgagctttctggattgtggtgaacgagctttctggagcgtggtgaacgaactttctggagtgtggtggacgagctttgtggaacatgttgaatgagttttctagagcgtggtgaacgagcttggtgctgcagctgggtctaggtgtgatgtgctccccaccaccccctctgccggctggtactctgtgtgctccccaccgccgcctctgccggctggcactctgtgtgctccccaccgccgcctctgccggctggcactctgtgtgctccccaccgccccctctgccggctggcactctgtgtgctccccaccgccccctctgccggctggcactctgtgtgctccccaccgccccctctgctggctggcactctgtgtgctccccacagccccctctgccggctggcactctggtgtgttcttggacggtggcttcaactctccaagccttggtttccttgtctgtatgtgaaattgatagctccgcctcttggagctgctgggaggatggactcagcacgtggggacgcaggggctggcttgttcctctggggcattgctgcctgtgctctgccagccgctgtctcgggtgctctgcggggcactctggactgtgagatcccctgctcccctggagcacactgcatatgacatatgacaagtgcttatgaaaacgcttccagagtcaccaaggtagacacagcccgaagcctgatgcctcagcctttccctgtcacggacaccaagtgtccctcacctctcggtcttcccatgtgcccaggacatgcctggtaggatggccccacccccgggggtccttggcactgctccttctgggcccactcctggggcttcctggaatctggcacttgacacctggagctgaacggaggccatgtcacggccacacgtttacacaggagcagtgtgtgtacacgtcatacacaggcaggcacggtgacggcagttgtcgaatcaccctgggtttgtaaatgaggccaacctatttttttttattagcataaaaacaaccttttgtgctgctcatgggttctgagggtggggaatcaggcagggatagcaggtgtggcttgtgtctgctccatgtgcctgggggcttggctggaaaaagctggagtcctgggaaggtttgttcactcccagtggctgcagctggcattggctctcagctaggaagatggagccacagctggaacacctacagccggctgccccatgtcctcagggcagggcactgcttccaaagtgagggtcccggagacatcggtgacttctgctccgtgcgagggtcccggcgacagtcggtgacttctgctccatgcgagggtcccggagacagttggtgacttctgctccgtgcgagggtcccggagacagtcggtgacttctgctccgtgcgagggtcccggagacagtcggtgacttctgctccgtgcgagggtcccggagacagtcggtgacttctgctccgtgcgagggtcccggagacagtcggtgacttctgctccgtgcgagggtcccggagacagtcggtgacttctgctccgtgcgagggtcccggagacatcggtgacttctgctccatgtgttagtaactcttgcgcagcatcagaagctgaggctccaccagtgcctcctgagctttgcctccatgtggtcggcagagctttctttggactccaacactttaattcttatggagcacttctgaaagaaaacaagcaaactcctgttttgaagctagaagtgctcagtccccaacgctcagtgtttaattggccctgagccttgatagaagcagaggccgtggccagtgctcgctcgctgcagctgggcaggcggtgggtgttgctgctcccgtccaccacagctgggacctggggggtgggggtgggggtgggggggtgggagggtgttggctctgtttcctggcccccattctgaccccagccctgactttgaggtttgctccagggtgtgcttggagcctgcttctcccctgccctgtcccaggttcttcctcttgggctgggtgtctccagtttgtgtggagacagaggcagtgagggccacaggctcgctgacctcgggggactgtccggcctgccctgagatggagtgagcagccatctttcacgaggacattttccatggtggtctgacgtgtccctgtgtatttaaccacttctccattgggggacattgactttcactatcttgcccttgtacaatgctgtattgaagatccatacctacacgtctgttcttctttcttggggagagttgctgggtcacgtggttctgacacccgctttcccttctcacagtgacctcaccacgatctaccccggggcctctgcactctgtcctctcgcagccaccttctcttcctctgactctgctgctggcgggcccccctttcccaactgtgtgctccttcctgccacaagcggaaaggcaggataatgacacggggaaatggatttggagttgggcagactcgagttggaatcctggctccatttgagttactgtatcctgagaagtgaaccgttctctgcccctgacttttctcatcaacagaatggaaataacatctgctttgtggagtgacattagatgggctgaagaatgcaaagtgcaggcacataatagagattgagtacatttgggttctgtttccctttctgcaccactgtccgtggtctgcacactgctcaagacccggcctcccgccccatctccatgtgcccagcttatgtgcagccgtggcgcggccttctgtgcctgtgggtggcctccggccccatctccatgtgcccagcttacgtgcagccgtggcgcggccttctgtgcctgtgggcggcctccggccccatctccatgtgcccagcttacgtgcagccgtggcacggccttctgtgcctgtgggcggcctccggccccatctccatgtgcccagcttacgtgcagccgtggcgcggccttctgtgcctgtgggcggcctccggccccatctccatgtgcccagcttacgtgcagccgtggcacggccttctgtgcctgtgggcggcctccggccccatctccatgtgcccaccttacctgcagccgtgccgcggccttctgtgcctgtgggctctcccatttgcacgtctgcttcctggcctgcgtcttggggagacagccctgggcctctgcaccgctccctcgcacatcctcaggtggttgttttcccttttctttttttctttctttctttttttttttttttttttttagatgtagtctcgctttgtcacccaggctggagtgcaatggcgcaatcttggctcactgcatcctctgcctctggaattcaagtgattctcctgcctcagcctcctctgagtagctgggatttacagacagccgccaccacgcccggctaatttttgtattttagtagagatgggatttcaccatgttggccaggctggtcttgaactcctgacctcaaatgatccacctgccttggcctcccaaagtgctgggattagattggagcctctgtgcccagcagttttcccttttcttttcttcccctctttaactagtggtgctcgctggtatctggctctcctgcccgtctgggcgtcctttgcagctgggggaaggcatggcgagttttggccagtgtgccggggtgtgaacgtggtgcatcacttctgggcgtgagctccttctcagtcctcttgtgccactgcaggcaatgcggaggcagcagcttccccctcagcttgggttgcagagtgaggagataggagtggccccgccacctgctaggaggggtggtcagggcaggaggtgggcctggtggttcgcagcccctcgggtgcctccatgtttgttggcgcagtgttacttggctgctcggaccagtgcgccatgctgctggtgtggggaggaggccagcccagcgtggtggtgctgagaggtgcatttgctgcatggaccctcttaggatgtccctgccccaggagagcctcatcactgtgatggcagtgggagccaagggttggggcagctggccttcccctgattcctcaaagtggcaaggactggtatgtttcatatattctccaaatgaggactgcaaaaacagggaagactaaattgggttggggggcactgaaaatggaataaataagcaaaataaagcagagtttgcattaagtaaaaggacagatcacccctaggtattcagggctattccgctgctctgtagctgacaggcattgtctaaaaatagtaagagcacctcctcgaagctaattctttcctcctactctgtgcattttgtttgggtggtgagagtggcgtagtcattaataaggcagcaaaccaagcccgtttgtcagtgggaagagcggggcctctggacctgctccttgttcctggagcacggagagcactaatgggcacccgccgggcacagcccctgcagcgccgaggttcagccagcaccgcgacaggcgccggcctggtgcagactcgggagcgcacacttcaatggctgttccctgggcaacggagttgccgccgccagctggctctgcccccagagcccatcaaagcacacaccctgccaggagccggcgcagcagcccgtgcggccgtctgtaggcaccgatgtcagtgcattggcagtcgggtttcaaggttaaacatgagggaatgaacgggatgactaacgagacagagaccgcaatctgggtatgtttatgcaccaggtgggagggagtgacgagggaacacaagaaaggaagtgccgggctcattgaagtctgtggggctgtgttttttgttttttccacacaaaaggctggaaagacagatttcaccacttggtctgagggtaaaagcatgttcagtccagggcagctgctagccatgtccgcagagctgtccatcttcaggcctctgtgcaagctgcacagaggggcagtgcccccacctgacggtggcccggggctggtgatggttgccgacaccaacccagcagggagctgacttggctctcctgttggctggtttgtcctagaattttcataaacttacttatttgatctttgcagggattcctccttcacttgacggctgcaccaactggctctcatcagtgagctttttttgtggcattgaatataaaattctcatttccacgtacgcagtgccccttttaaagcatcctggcatttgaacttggtatttccacctaacactcagttccattcatgtgagcccctctagtgcttaaaaagggtctctatcatcccgcagaaactttggttttaatctctcattttgttaaaactattttttgtttgttttttctctctgatctataggaatttgaaataaacacagttacatttgaaaagatatggaaaatccaaataatttatttcagaatcaagtttcaacataaaattttaatttgggatggttggacaggtaaaaataagaatatttggcatattccacattgtaacataatgaatgtcaatgctgtttccgccttgaccgtctgaagggagctagttcgatctactgagcccttccaggcacgcgttcctgtatacgtgggtgttgctcatgagcactgtgtgataatagtgactttttggagccgctgactaaatttccagatttttcctcagttttttcatctcaccactccagttgctctcttttatgtgcctttttccatcgttttgctttgctttaccttttcatgaaacagatgtaagtattcccaggcgcctaatccctggatctgtttacctttcataatgaagacttctgacttttgagaagtgctcactaactcgccctatgttctcaggaaatgtgcacgctcactggatttctgtaaacaaatctccagccttcctggagggacaccgagaaggagggcaggtcccagccaccacaaccagagggcacttttgggccaagaagagaaatctgacttccctgatttccaagttgttgagtggatgtttgtgtccactcaactgtgtgagccagacctcgagtaccgaaagaccagggagtgtggtgtgcattccagccatgaaggcaaggacagggtgctgtgcccagggaacatggctttatgtggatgggggtgggtatggtgcttgggttctcctagaggaccacgtaggagacagcaccccaagctggaggccaggtacagggatgagtcaccagaaggagggagatcaaggggaggaagagcgtccagcagcagcagctgcacaggcggctcctggaaatgaccacaggaggaggcgcgggtggcactggctgcttgtgctcagacctctaacctgggcatgcagcttctcatgtcctgaggctgagaggagctgcctctccttgagtgcgctggaaggcacagctttcactgtggcactggccatgtccctctgggtgccatcacctctaggagccatattgtggaagccatgccagtggcctctcatgggagtgaaggaaagagcttcccctgaacaaaacaggcctgctgatgttaaaatcagagcggatacttgtagctgacttagacaaggcaacctcgtttgctcgcagccttgagcccttcccatctgcaggcgcggtcagggttgtgagcgagttggccagagcccctcttcccctggagcaggttagattcaagttgggggagacaagcagagaggcggggccagtcttcccagggccactcacccgcggcccatcctgttcctcatgccagggtgtggctcgtgtgaagcctgagatgccgcctcgaggcacctggaggatgggaacgaggccgggcgaggagttgggagaccgggtccgagttcctctgtgtgcgtgagggagcgtggagcctccttaaggttttgccgacttgtctgtagctgtgggtaaccaccacggtgctttgcaacctgtgaggctccggactcaggtttaaaggggctaagcagggcggtcagtgtggaaggaagagtgttttggaattactgctgcatctccccttttttctcacagttaaagaatcggaaaggcataaaccacaacacatccctttcctcttctaaggtgattacaagaaaatggtgaaccagaatgggctccatagaaatcatacaaatacataaaaatagaaagataaatagtaacatttatttttcttttctccgtccttacaaaaagctacttgcaaaactgcagctgataggctccaggctgcgctgcggtgactagtaagaggatgaggtcctgttacttctttttagccagagacgtggatataagtgagaggtgtttgattccagtgaatcgtttggcatgtgatggaacacacctaaacttcctgggttgtgtgtaacttcgcatcatggtgttggttcacctcacagctctgcgcgtcaggtcagcggagcagcctcctgcagttgcacagatgagcaggccgctgtcccgaccctcgtgcctgggcattcaccattccataccttctttaaactcgcttctgttgagtgtctaccttatctcttaggctgcatgatatgtgcattcatttccatctcatttattattttaaaaatccccagaagagaagcattggtatctgtctacattttgcagctggggagactgaggcttagggattgtaagtgacaccttgcccaggatcccagccagcaggccacaagcggggattccgaccttgcctggtatgatgtccatttggccctgcatccctgtatcctacgctacctcgctgggctcaaggtgacagactattccgacctcttcccagtatttactgacaaatatgtttttacagataaattgattgaatatttttataagagagtgtttttgatattccagtgtgggaaaaaatattggaaacctaattacatcagtcagaaaatcatcagatttccaaagaatgaagggatgaagattttttggagtgaggggtgttaattaatttctgacatgatcggttgcgaggtgtataatgctgatttttaaaaactacctcctaaagtgctgtgtgtcacatttgctttagcaaatgctggcaaacccacattttcctgttttagtgagaacatgggtgtcgagtcactgtccagaaagtagtttgatgtcaagcagatgtcactgtttccttctgtaggcataaaaaaatggttcgatgtactcagagcacaggtgaactcacgtatcaaccaaggtttatgctgtctgccagattgcttctgttggctggaggtgaggctaatgggctggcgggaggttgggcagtgccccccgtgacctcctccctgcacagggcagcctctgtggggcttatggggttgccagttatggggttgctggggcagacatggccttccatctgcttgatcttccgggcttgcctgaatcctgtatgtagttgggttttggaggtgggccgacctcgctgatggtctgggggccctgaagcggactcagctggaggggaaggcccctccccttaaagaaatggccacaagtggagcctccggtagagcaggccaggccaggccaacctcaggggtcggaagtcgtgaggaaggaagagggtgagctgggcctggctgcctcccagcctgctcctgccagggtgctgtggggactggggaggacagggcttggattaaggagagatggtgccctgggcagagcagctctgcacggagggagggtactctctcagagggctggctggccacaggttaaaggcaggttcccctggctcctgcagagaagtggtagcttggaggaggttcctggttgggcagcatggggcccatggtccaagggcagggcatgtgggcagtggcaccaaccacagtctgcatgtggtgtggatggcagcagctgatggggcaggatgcagggatgcaggtggcctttgccatccacctgcgtctccccctcctctcgtttccatctcagactcccctgggcctctggggcctgtgcctcgtacctggagtccccacagacagactgagtgagcctggggacggtggtgggaccaggtgaagttcaaccacaggtgcagaccctcctgttattcccagggatgattaggaagggcagttccctagtgagggaggcctgggagcacagggtgggctggggccctgaaatgggagtgctggtgcagccctgactggcttgtgccccctcattccatgaatggctggagaacgcagggacgggccgaggaagtgccgcttggttagtgccgtccaagggctcaagtccaccgtgaaacacgccttttcatgtagctcctttccatgctcacctcagcctgagagacgcacagatggggcagcaatgttcgcagcagtcagggcccctagccgaggctgcgcaacaagtaaatggagggtaggggctgagatacggccgactgcaggcagcgcctggcagggacccccactcatgccccgggctccttagagtagcaggtgggcgttactcagcctagtcaggtgggtcacttaattaatgagaaaaggaaccagatgaacaccccggggagtagttcccacggcctggggttgttcaccgggtaagtgagttcttatttgtaaagcacgtaggtgaaggccacacaggcagggcgaagtaaatgtttgcagaatggtcttgccacccatcacctggtaaggttttgaagctgttcatctttgacatggggtcaaggcatttctgcagacctgagtatcccgcatgtaaatcacccttcttatgtaaattattcccagaaatgtcctctaccgtttccagttgtagtttcaatgcgttgaatggagaacagaggacacgtgtggagccgtgtgagtggagacaggtgtggggccgcgtgggtggagacaggtgtggggccgcgtgggtggagacaggtgcggggccgtgtgggtggagacaggtgtggggccgcgtgggtggagaggctcctggatttctgtggtttctcccccaacattgcactttgttttgcctgcctctaaatgggcagggtttttgaataacttgtttttactgagacttcctcgtacattcacccgagttttcctggtaccttctctttctcttacgtttttaattagagtattggattacacagtacccgtaactgacaaacaggtttgctccctggtgacttgtctcatggtttaaggcattactcaaaacataaagtgtaaatttagaaatttcagtaaattaatctatcattgtaggtgtttgcattttaacctaatcatatggatgctattatttttaatattactcatgcttagagttgtgttccttattaaaacaaccagaacttagagaaaactgtgaacccagtgcacatccactgaaaacgccatccgctggtaaattacatctgtagatctagaggaaacctttccaaagcatcctagcataattctagggatgcggaagagcagccatatttatactttttcaaaaccagttgacatggaggtagtggacttgagctggccacagtatgagaccgagtggcacatgggccactgtgctcccaaaccagcaggaagacacccagctttgtgtggtggcccaagggtgctgggtgcagcaggaaagaacatggtggctggactcctgaccacgttagaagagcaatcttgcagaaagactgcagctaaactggctgtagtttatctcttacatgttataagaaaaaattataaaagcaatatttttcatgaaaggaaatttcagagctgtggataaaagtatttattcagcatgggctcccacatcatccgttctctgtctggagatgaatatttatgcaccagaatagctaattatgttaccaataaatcgtcaaagaataatttttagaagttttttgatatagcatttgcaacagcaaggaagtaaacagtccactttagattgattttcaccctaaatggtaatttctaaaaatcgagtacacttatcttgacaatttatctgtgtttcatagcaatgcctatgaaattgaatggtttcttcactttagtggtgtcctttcattgcctaccctactgttttgtaaatttttaaaatacttatttgcttaaggttattggtacattggatgcaatagagtagaaaaatacagtcgactttgagtccaaagccttgagttctctttttgttctgccattagcagttgtgggacctgaggcaagttactcagctgtcatggtagcaattttctcctgtaacctctataataatcttcttgagtgtatagtctttggcagctagataatttaacttagtagtgtttgtactgtaggatttcagcacatcctcaattttgccttttcacatttagccattgtttgctgcctctcacaaggatgtattattgtgaagatgcaactttttcctaatcttttattctctcttggtggtttttagaaattctgatgttgatatggagtctcttttccataaaagggggatgtcagttaaaaaaggaatatgattgtttaatagtaattctttgaaatatattgagatttttaatggtatatcgtatggattaatttttatgttgcatttacacttgagaaaaaaattatgttgtgtttgaatcttttataaccttgctattttaatttttttctaactggttctatcagttattgaaagatttaaagtctcccactatgatattggattcctctatttttatttgttctgtcaatttttgctttatgtgttttggtgtaattttattgagggcatataagtttagaattttttgtgtttctgaacctttgtattgttcagtggtgacccttactgcttttgctcagatctattttggcaaatattaatatggctaaatcagcttttcttttgttgcttggtgtggtgttttctgttctttgccttcctgtgtcattacgttttagggatatgtcttgtaaacaatgttttgctgatttttaaaaaattcagtctaacaatatccagctgatgtcccttatagttattgtgaatactgatctatttgtaataattcctgtcatcttattttatactttttttttggtacaactttctttcatcttactttatgctgttttggggggttttggtcctttcttgttctcataaatgattttgaatcttgtttttgctccatttctcttactgtattattttagaagttatatgctctttttctactgataacatgttgttattcatatttaacatgaaatctgaaattaaatattcagtatttctctattccaacaatatgaaaagcttttaaatctattttcatctcccttctatcttagatactttgttggccagtattttaattttacctttgggtatttttattaacctcaaaagtaaatattgttattatcattagtgtcacacatatttagatgttttctagatttttgccatttatttcgcttaattttttttttttaacttcgaatttgagacctttcttctgggatcactttctttattttccaaatatgtccttagaagttcccttagtgaggcttttggaggtaaattctcatggttttaaaaatattttatttataccccaagtagggtctcatggcttgatttaccttaacatgcctttatttttgagtatttagctgactgaacagttctgccctgactttttttctagcattttgttgtgtgctgtctctggattcctttggtgctcttgggaagtcagctgcccaactgttcatagcactggcaacctgtaagtttctgtctttgtctttggtgttctgcatttgtgctacagtgtgtccaggagtggatatatttttaattatggtacttggagatagttgtgctcctgagtctgataatttgtttattgatattgtgcctgctgttttctgtttttcctgtgcaccccacttaagggtacagtggaccctctcagtctatctcccacattcccacgctgcagtctctgctgtgtcctaggttctttcttcacatctttattccaaatgattaattctcaccagttatttctaatctgctgttaaattgccaacagagacttctatttcaacagtcatgatttttacttctagatgctttattattttttttaagaagattcctggtaaattgtgatagtcttttgttgcctgctcataatccagcttttatttcttcgaacattgcgattatagtatctgaagtcattggaatgctctgttctcttggcctgccctcattcaggccactgtcttcatgggtttgtcgtgggtcacaggctcctatcaggctgccctaagtcggtggggcctccaaggggctggcctgtgggtgcattcctccagagacgattctcatttgtttatggaaaatgtccagggcggcccaaaacccaggacttctttaagttagattcttggcttaggatttcctggaccacaccagtaaattcaaagtcaaacttttgtaaggatcagtgcagttttcaggttctcagtgtagattcttattttttataagagccatagctgagataaacaagtgggtttttttttgcgtgtgtgtgacatttttctatgcatgccagctggagaataatgttttctagctcattcgtgtaatgaggttgtgggttttaaggagcctgtgtttttgcagaggtcctagtatctcctctttaccttttgtgggccaaaagcttactttcccgttctatctgtggcctttaggttcctagcagaggccaagcatgaagggtagctaaccgtggtttatcattttgttttcaacaacagctttactatttgctcccagtcgtattcttcacttccctgaaagcacagctatgccttcaaaaatatatctaagtattttagagaggcatgattttgttttttcagaattagctgtattgctagaatccaaagtcctagaatctattgatacatgaaagagaatgtgaataaagatactgtaaagtaaaataatctcaaacctttacttccatccctgggcttcacataacaatatcaaaccgcctagtagctgttttcgcgtagatagctcttgacatctcaaaagcagcacagtctaaactgtgttctctgaattactcatgtcagtgggtgatgtcgccattggtgtagattctaggagagtttgtcagtcagggtcaagaaaccactctagatacagacgcacctcatcgtattgcactgggctttattgtgcttctcagatgttgtatcttttgcaaattgaaggtttgcggcaaccctgtgtccatcaaatctattggcccattttttcaattacatgtgccagctttaacagcacgtcccactctgtggcacattttgataatctcacaatatttcaaattttttcatcattattatatctgttatggtgctctgtggtcagtgttctttgatgttcctattgtaattgttttggggctccacgaaccatgcccatgtaagatggcaaagtgaatctgtaaatgtgtgttttgaatgctccatcaaccggcagtttcctcatctctctctttcctcaggcctctctgttccctgagaacaacgttattgaagtcaggccaattaataaccctataatggcctctgagtgttcaatgaaaggaatatctctcactttaaatcaaaagctagaaatgattaagcttagtgaggaaggcaagtttcagccaaaagctgaagtagaccaagagccgggccttgcacaccagttggccaagttgtgaatgcaaagggaaagttcttgaaggaaattaaaagtgctactccagtgaacacacaaatgataagaaagccaaacagccttcttgctgataatggagaaaattttagtggtctggatagatgatccaaatcatgcacaacattcttttaagccaaagcctaatccggagcaagaccctcactctttattccatgaaggctgagaggagtgagaaagctgcagaagaaaagttgggagctagcagaggttggttcacgaggttggaggaaagaggtcatctccatagcgtaagagtacaaggtgaagcagcaagtgctgatggagaagctgcagcaagttctccagatctgcctaagatcattgatgaagggggaacacttcagaacactaaacaacagatattcagtgtcaatgaaatacccttatatttgaagagtataagtcatctaggactttcatagcaaaagaggagaagtcaaagcttggcttcaaagctttaatggacaggctgactctctcattaggggctaatggagttgttgacttttaagttgaagccaatgctcatttaccattctgaaaaacctaggcctcttaagaatgatgctaaatgtaccctgcctagtctctgtaaatggaacaataaagcctggatgacagcacatctgttcatagcatggtttagtgaatgttttaagccccctgttgagacctactgctcagagacagactcttttgaaaattactccccattggcaatgcacctagtcacccaagagctctgaaggggaggtaccaaagaaacaaatgttgttttcatgcctgctagcacaagattcattttgcagcctatggatcaaggagtaatttcaactttcaagtcttattatttaagaaatacatgtcttaaggctgtcgttgccactgatagtgattcctctgatgggtcttggcatagtaaattgaaaacctagaaaggattcaccattctagatgccattaagaacatttgcgatttataggaggtggtcagaatattgacattaataggaagttaatgggggaagttgactctaacccttgtggatgactttgaggggttcaagacttgcatggagaaagtaactgcagttgtggtagaaatagcaagagaacttgaattagaagtggagcctgaagatgggactgaattgctacaatctcatgatcaatctcgaatggatgagaaattgcttcttaaggatgagcaaagcaagtggtttcttgagatggaatctactcctggtgaagatgctgtgaacactgttgaaataataacataggatttagaatattccataagcccagttgataaagcagtgttagggttttaaaggactgactccaattttgaaagaagttctactgtgcataaagtgctgtcaaatagcatcacatgctagagaaatctttcatgaaaagaagagtcaatagatgcagaaacttcattgttatctaagaaactgccattgccactccatccttcagtagccaccaccctgagcagttagctgccatcagttttgccattaaggcaaaaccctccaccagcaaaaagatgacaactccctgaaggctcaggtgattgttagtattctttagcaataaagtattttaaaatcaagatattcccagtagttttttagacataatgttattggacacttacttgactgcattatagtgtcagcataacttttacatgcactaggaaaccaaaaaattaatatgactctctttttgcaatattaatgttattgtggtggtctagaaccaagcctgcaataagtgtgcctgtgtttcagaaagaggggatttcatccagggaggaaacacagatcttagttaccatgggaagcagctaccaccgccgcatggagacgcaaaaggaaaaggtaatgaacctggagcttggaggaggtaccccgcagagcacacactggcacacgctgacacaccccaggccctctgcgggagtgttggcatccatggagcaggtcttctgagagactctttggaactgagaccctgcagcgagcacccgtgtgggcacagatgggcttgcactctgctcagcctgagccctgacatcccctccttgtttcacccctgctttgtgctttccaagtcctggttatatgggcaaaatggaggctactgcctctaaatcaataaagatccatatctctgcccatctgcccatctggacaatgtggacagccaagtgtcctgctcagagttttgcctcctggtatgatttctccttaccagttgttgtcagagacatttcttcatggagcacctaccgtggctgcagctcatgaggcagtgctgtgtgcaagccaagggctggtgctcccaagctgagggatggtgctcctcttcattcgcgtgctggggagcttcccaggagaacagaggcaatgcagctgcgccaagggcagagggatctgctgcctctagttgtgccatctgcctgtgcctcaggacctgcttgaacacaattttgtttggacgaagcgagatttccacgcaatgactgagtgcgatgattgagtgtgatgattgagtgcgatgattgagtgtgatgattgagtgcgatgattgcgatgattgagtgtgatgattgagtgtgatgattgagtgtgatgattgagtgcgatgattgtgatgattgagtgcgattgagtgcgatgattgagtgcgatgactgagtgcgatgactgagtgcgatgactgagtgcgatgactgagtgcgatgattgagtgtgatgatgattgagtgcgatgattgagtgcgatgactgagtgcgatgactgagtgtggtgatgattgagtgtggtgatgattgagtgtgatgattgagtgcgatgattgagtgcgatgactgagtgcgatgactgagtgcgatgattgagtgcgatgactgagtgcgatgactgagtgtgatgatgattgagtgcgatgactgagtgcgatgactgagtgccatgactgagtgccatgactgagtgccatgactgagtgcgatgactgagtgcgatgactgagtgcgatgattgagtgcgatgattgagtgtgatgattgagtgtggctgctgcttctgtctgtgcttaaggcttgatgatcagaccacacgcatttttggatgtgcagtgctcagtgtacagcatgcccacatgatggagtagatggggaagccaggaactgtgtccggataggagagaagttacctgcagaagggacactgctttcctcccacacctcagcagctggcctgtgattctcccgtgggcctcccagaggccccacacagcctgcttgttcacccctgacactgtgggtgccagtggccatgcaggtcttcacagcctgccatatgacataggtaggctttgtatcatatgttacctcccagattcaaaaagccccaccaaagtcggcctcgtgttggtgaagatgcccccacctgctccacatcaccggagcttgaagcctctccgagccaaggggagccggcttacttcccacccctgtgcacttgtgttgtttgggtatctgaggtgcccaaagcttcctggtcaacaggccccttgcgcgcgctgtcctagtgtgctttctgtccctgtgattgaggtctttgtggatgaggtcaggctgtattggtctgggcaggaagtggaaacagagcaggttaaacagggaagtttagtataaagaagcgctaagtgtggtagaagagtcacaggcgtcagatgtgaagaaactccctcaggtcaccaggactgagcaagaacagcccaggaaggaacatcttggagggacgcagacctcggcccactgtgcagcagaggtggctgctttggccaggctggagctggtccacagtcgctggattggcaggaggctgccctctggagtgcaggtggggagtgggcggtcacagctgatggcatgctgtgcccagagagtgcagagggtgtgggaaccctctgggctatagacagggtgcagataggccccacaggtgccttcagagggaaccaggatgctggcgcgggccccaggcctcccggagctggtgtgggcaggaagccttggggtgccagtctctggattgagaggcccatggaaaggctatcaccaggctgaggtggtggggtcacagagggaccaagggcccagtgctggggccacgcttccctgcacacactcacaaccactccaggaccatggcgtggaagcccctgcctcttgcagtctccttccagggctttcggctgagaacgggggctcacctccaaggacagcagccaaacagtctgtgcgctacacagggcacggtctgcagggcgccttcagcacctgaggtggcaagtgggtcactggcacaggtagatggagccagccgatttcttccttaaagggccagagagtaaatattttaggctttgtaggccattcggtctctgtctcatattcttctctgtgtccttttatgtccctttaaaaatgcagaaccactcttagctcatggggtgcaggctagatgtgcccgatgggcacagcatgttggccccaggcctgagtcttgatgtaggtctgcagcaggacgtgaacaggcactgctggccttgccaggcaacagcaaatagcttctggtggcccttcaaattggcggtgtgagaccaaattgctagctcaatctttatatcagaagccagggcctgcattcttgtatagacatgctctgtgacaacagcgtatctgaaatagctgcagttggggttgcccgcctgattaagtttatgatcatgcactgtcattctccaagaacccgctgctgcgacgcaggccaaacagctgggtttagtggggtgtggtaaaaggcagcacccagcacctttcacagcctccatggtgctcctaactctccatcccaccaacactgcagtgttgcttttggttgactattttcacaggtgagggaatgtcccggggcatccctctggtccttcctgtcatcattggctctgtagccatggagtgagtgctctgtggtcgtcctgccagtgctaggtctgcctattccaacacacatacagggattggagaaatagccgcaggttggatacactgaccccactgggccctctgaggtggacttgggccacagcttccgggtccctgcttggccgtagatcctgtgatgtgttgggtccagtaggactggcattgattcagggtgtgggggtagttccctctccccatggtcagctctcctataaaatagccacgggtccttccccaaggggacctgggttcccctaaactgaggggccataggcctgtgagctggcttaggtgaagagccgagagaggccacgcctctgcacggtggtcatcgggccagctttctgtctgtcctgagcctttctggcatgtggagtaggggctgagcagcctgcctgtctttttctctcttggcctctgctgcagctccatctgggctagactgctctgattggcacatcatgcttgtgcccactgtgtctctggagctcacggccagcgagcccctgacacctccacttctcagcacccccttcctgttggggcagcagcctgttgtgatgctggcaccacctcctgctgcctcctggccagcagagcttgtcagaggcgcgggtgcccctcaccagtgcctggaggataagagagttggtgtcatccttgtcttgctcatcagccttgccgccttctgcaatcagtctctgcccctgcacactcaggcgatgcaatctgtacatggtgccatccctaaggcatttaaaaggccatcgaggaaggtatttttaggcccagatcttcagacatcctgttgtgcaccccgaggcgtacctgcatcaggtgagcgcccagtgaggctgtcatttgtcctcatccatcctgctcagctcctgccagactcagagatggctgcgggctctaaaaatagtcccatcttaaggtactgcttatgcagccctggaaacctcctcctcctccagctggggatcagattatgtcccccaggcagggcattgttcgccctttagccgggctgactggagctactattcatgctcacaaaggctctgatctcctttgaattcctgtaagccttttgcctggtaatcccttccagcaggcagcacacccgtggctgcagttggcagtcgcgaatatgcctccctcccttcattttgccctgattatctctttatctcattaagggccttgagctcttgtgttaacatgtgaaaagtaggtagtggcttcaaattggctttgaagatgcaacttggaattttctctttcaaagcagggggctgttatgggagtcaggaggctccattcattctggacatcagcgctaatgagctgtttgaacttggaaaagtcagtggcttcactgggcctcagtttcctcatttgtgaaatgaaggggctgtgttcattcagcatgatatcggagttccctttcagcctaggtatcgtgtggttctctgacttctgtcggcacagacacagtttctgtgggcagtgctgctgcggtttgtgccatatgtctggttttatgtggcagccttgagccctgccctctgccggctcctagtcattgtgatattaattcggcacaggaagttacattacagaacctcagttcaggagcgtgtgaaaaacatagataaaagatgaaatgcctccctgcttattaacagcatttgccttctaaagattaggttttccttcttaaaagctccttagtttctttgatggctgctggatgtgtgttgaacactgttgggatccacacagctacagaaatcctcagagtttcagagctgatgagtatgtccccatgggtgcttcttccttagtgctgtttaccttccatttcatctgcctctgaggatgtggagtttctggaggtaggaatgccaactgtatttcctgagccccaagcacactccttactcagcaacgtgtgcagcttcgttcatttttttgggtgacgatgccagagacacctcctgcctgcacacccctctaatgttctggtcttcctcagggtggtttctggtgttcacatactttattaaggcactttgaactcacctcgtacccaccagattttcagactaaattctagaaggacaattttataatcttttggaaaatctatgtaaatttttcatacactagacatttcattaattttattttagttaccaatttttagaaaaatgcattggggccaggtgcggtggctcaagcctgtaatcccagcactttgggaggctgaggagggcggatcacaaggtcaggagttcgagaccagcctgaccaacatggagaaaccccgtctctactaaaaatacaaaaattagctgggcatggtggcggcaccagtaatcccagctactcaggaggctgaggcaggagaatcgcttgaacccgggaggcggaggttgcagtgagccgagatggtcactccagcctgggtgacagagcgagactcggtctcaaaacaaacaaacaaacaaacaaacaaaaacagcattggttcatagtgttttgcaaaggaatgggggtgaggttgtcttcttgtgtcatgtgaactcgcacgtggctaacatagttgatgcttctacccactgcagttcccttttttcatctgtcctgcccggaggaagcctcctctggcccctgcctttgacacttccctagcagtgcttggagcttccttatttgccgtacacaggaaagtctttatccagttcttctggggcatggcaagctgaagatgattgggacattcattacaataaggaagcagcctgcctatccatcagtgctaatgagccggatgaacggataaagaaacatggtacaaatggagcattgctcagccctaagaaggaaggaaatcctgccatccgcagcagcaggatgaacctagaggtcttgagtggaataaacccagcacagagagtcagacaccacgcaatctcacttacatgcagaatctaaaaatactgaagtcacagaagcagagcaggtgataacagaggctggcgggagggcggatggggaaaagggagatgttggtgaaaggatacaaagtttcagttaaggggagaaatgagttccagagatctattggatgtcttgctgaccacagttagtaacaatgtatcatggtaactgaagttattagcaatgtatcatatacttgaaaattgttaagagagtagatttcaagtgtcttcacaacaaaaaatgataagtatgtaaggtaatgcaaatatgaattggcttgacttagccattccacaatgtatacacatatcagaacattactataaatatatgcattttttaattagaaagttaatggtgctgcagcatcatttgttggggacacagagccatctggaaatactgggttccaggcctctgtgtgctattactggggcaaggaaactgacagaggagctgggtccggcaccgtgccgcgtcctggggaaggcgctggccgcaccgtgccgcgtcctggggagggcgctggccgcaccgtgccacctcctggggagggcgctggccgcactgtgctgcatgcttttgctgcatgaacccggctcacctaggtggtgcgatgtgatgtggataggagatcctgggcccactcctgcttgttgtatagtgcagttctgtggcttctctgattatgtgctatttgtagtggtggggccgttgaggggtggtctctggtcagggcatcagggctttgtttttgcagccaagaaaggcaaactcatacttggactaagtgtcggatgaacttcttcctgttctcaggatggaaggggctccaggcatcaccttgccacatgcaatactgtgggtgggtctccaatttctcagtctttttacttccaggcttctaaccagtcaccaggcagttggccatgcccttgagtatgggccactttttgcacgccacagggatggccagagcagtgctgggagccctgcctcatgatcaccgttcttcacaatcagctttccctccatgctctcccagccgtctcctgagcgtagccgtctgacagcgcctgccaatgtttggcttatgccctctcccgaactcattgatctgtaaagcagctcagatctcttctccttcttcagctaaaagtacaggactcccacatggccacaggcatgagtgcagggagggtccggggcagagaagtcttgtatggtttgggcacctaccatgcagttttctggtgccctctggtcctgcctgactctgtcctgtgtgcaccgtctctactttgtagtcaatcactgctggccctgcccgaccctgtgccgtggtgggtatgactgagctcttctcatgagtgacacgtggcacttggtgccccatggccaggagctccattatcaggacccagaggcatggtcagagctgtttatcaaaagacatggttctgtgctgcagatggcatggcttgctccagaaccccgggaccacgtggtgactccaaccgggctctccacaaagtccacactgcatgctttctaccactgacaacttccacaccagcaggtctactaggcgtccccagaagcagggctgcctctccccagcctgatcttgctgtagtgccctcttggcctaagctggcagccttacgtgctaccccagcatctgggctggtccagccttcctaggtgtataatgtgtcacctctagaatgaagagggctggcaggcattacagcgtcttttctgcttttgctctggaggggaagtcctggtgtcctcagcagaagtagcaggtcctggaattgccatagcttgtgtttcctgccgtcttgccaaggtcttctgcacgctcctcctacgttgtcactgtaatgtcatgaatgcagtgggtccatgtgatgttctgtgggctgcccaggtctgtttggactatattatgatagaaaatgggagaccagcacagctctgtggcaagagtgtatactgttttcctttgcttgtgaatgcggatggtttctcatcttctttcttcattgggataggacagcgtgcatttgacggtctgtgtacacacatcatgtgcctgagggcctgggaatctgctctaacaagactccacagctggcactgtggatctgagtgggctcctgctttgttgagcttagagtcatccacaggcattctccagggcccattagctttctgcagaagccaatggtgaattcagcaaagccacacccacttcatatccttgattcttaaagtaagcgcaggtctctaccactctttgatgggttgggacggggaggcagtttcagaggcttctatgtgaccttcccattaactccacaggtcacaggcccggtatgggtatttcacaaactgcccaggatgtcaatcccatttgaccttaacagaccttggagttgcccaccaggtgcgcccacagactcagaggatctgcggtaagccaggccctgcctaggactttacttatcacctggcatccccatgccccactcgggccggaggacagtgggacactgggttgctggacccctgtgcgtgtctttgtgttcagcagacctggaaatgtgtggggattaccctttgcccagggaatggcattcaggaaaatggccgtgggtccctttgggtacagactagggtaatcattgcagtgtacacctgccctagggttgcaggttcctaacccgtggggaatctgaccatctttaccgtcagtgggttccagctctgaagctgcctcaaatctggatctgggtaagggattgtgactgtgagtggggtgacttccctcagccttctgctcattcattcttgttttctttttaatatgtatgtacgttatgtacgtttgcactcatgtgtgcatgtgtcaggcaggcagtactctccttgaatgccttgtctgtttcacccctaggaataccaactctattaactgtctccacagccctctgccagttgagcttccttggccggcactctggtctcgttggtcattatgataattgccaccccctgacttctggcagttacataccgtcacccgaccacatttacttggggctgggtttaactgcccaagtcagaaagctggacaaagcttattatcaacaagccaagctttgtgacagcttcttctaagagtggaattattgggtcatctggtaagtgaatgttcaactgcaaaagtgttttccaaaatgtgtgtactgttttacactcttttttcacaatccgtgagagatccagttactgtacatctttgccaatacttgctattgttggtcttttttaaatgaaaatttcaccactctagtaagatgtgtggtgagtctcacatggtttcactttgcctccttccaattattaataatgttgagcatcttttctggtgcttgttgaccattcatatgttttcttttgtgaagtgtctgatttggcgtaaggtacatttaaaaaaattgggttgtttcattattaagctgtgggaggtctttatatttattctggatacaggccttttgtcagatatatgtattataaatatctcccccagtctgtcttttcttttcttttgttttctttctttcctttctttccttccctccttccctccctccctccctccctccctccctcccttccttccttcattttttgagatggagtctcgctgtgttgcccaggttgtagtgcagtggcacaatcttagctcactgcaacctccaccccccagattcaagcaattctcttgcctcagcctcccaagtagctgggattataggcgcccaccaccatgcccagctaatttttatatgtttagtagagacggggtttcaccatgttggccaggctgctctcaaactcctgacctcatgatccgcctgccttggcctcccaaagtgctgggattacaggcgtgagccaccatgcccggccactgcttcatttctttaatagtgtctttctgaaagcagagtttttcattttgattttaaagaagttttaaattttaatgaagtccaattaatagggtcttttggtgaatagaagttcttaattttaatagattctatgttattcgtctttttctgtatgatccagctttttttcctgccatttaaggaatctttgcttgtcccaaggctgagaagatattctactatgtattcttgaaaagatttgtattattttatctttacgtctttatcatcagtctagctggaattggtttttgagtatgttatgaggtaggatacaagtttattttctttcatatggatatacaattgatccagcatcatttattgaaaagaccatcctttctccactcttgagtgttatttttgtagtaaaacaagtgaccatctttctaagggtctgtttctttccagcttccaaaacttcattgctcttctatccttgtgggtttatgtttttaaaagaaaatagaaagaaaaacccctctttgttacaacattagaagggtttcagaatggagtaaaagttgaagtgagtgtagattctcttatctatattttcttggaggttcctccattgccttctctactctgtgaagttgatggactgtggggagagaggtgaatagcgctacatgaaccggatacgtggaaacttcattgtccagctggtcacttaaacattgtatctggtgtagactttgaagggaggtagcttacctgagagtggaaaatcttacttcacctgtaccacttttgctttattgagggcaacgtggatatagttaaggagtttggtgagctggcgtttacaggaaagtcactttctttacacctgaacagaattctccaaagaaggaacttgttggggatgtgggggggagtgtctgccattagtcatttcttccacagaatagctgtttttactattccctgcctttgtcatcttgtgtatttcattcattttgaagtgcagccacaatttagtgctcccattattagttctataacttgtaagattagacatgtatttttctaccatttagaaagattaagataatctacacctctgttgggttagtgtgtgctagtgggttaggcattcatttttttctttcctactccaaattgccaactttccctttggttatttttgtgtttccaggagtgccattgccaatctcgtgggctctgcagaaagatcgtgtaactgaaaatttcagcaaataaataaataaataaataaataaaattcccttgtagacagaactgtctgtacactccatttttgtaaagttggaagtgtgaacattatatgaatatatgatggagttttttttctttaagccataattgcatgttcttttagacccaatatggtatataaaatggtcactgaatttggaatcagaaaatcctggttgaagtcttaatcttttaacttcttatcattcaatcatggttaacaatggtattaataatattcacaaagttagatattttgtcattgagttcgttgctatattgcttggtcgattagttgatattgagatcgcaagagcatcatcaccagtaagtgatacattttcgattgtaacctaaggtcgttgttattttgtaatgccatgctgttttccttcttgtactacccatgaaatgtttttttatgttctaacgcaatatataatatttttatgttcttcacttgttatcaattgatgatttaatgttgaatcctgtttgctagtttatgattattcattaaaggccatctttaaaagggagaggtgtttagcacatattcaattgaaaactaaatggaaagcaaattctgaaaggatttatgttcaagaattcaatgttaaatctaatttttaaaaaatttatcatattgagaaattttctagagcatcagagaccttccttggaaacaagtgaccccagtctttctaatgcaggttgagtctctatccacaaagtggcttttctaggtactctagattcctggagcatcttgaaaatagagtatcaagactcagggagaccgagcagccaccagcaggatcgtgtaaggatggcactctcatttctaggagaagaggctgtattgatggtgacatgaccaggctgggctgccacctgctgcccaccagggctccaggcctcagcatgcgatgcctctgaatggcattaccttccggtcccagatactcatcactttaggtaaactgaggcagaataacatgcgtgacaggatttccgaatggaatatcgctcagtgtgcctaatagtcatttaaggtgatctcatacagctatggagagaaaacccgtttaatgccaaccttagacaccagctgcgtgcgtggtgattatatctttagtcccccattttgctcccttttttgaagaactattgaagaagaacggaaggaaatcgattttgaggaaattaaattttcttttgaaacagcatgatggtttttaaaacaaagagaaagtggggaacaggatgctgattacgaaccgtgccgggttctgcctgccgactcaggctgtgcttctccctgctccgtctttgctgcctgcaatcgtacatattttaaagagcagatgcgcgctgcttatggatttgtgtaaatgtgcgtgtgctgtctgcagaatgcggggcacaccgtgctctgttgacattatccattatgctctgttgctcagcttcagacagcaaagtcctgacatgtgcagccgtgtggaggatgccgaaggaattggaatcaggcagccacgagtcccctgatgattcatccagcactgcacagaccctggagctgctctgtcaccttgacaacacagcccatggcaacatggcctggtaggattttgcatatttcatgcgcccagaacgagcctgcaggttggccaggtgcaggagcttgtgcagattcctttgcaggagccaccgtccacacctcggaaacgctcctttcttttaaaaagctgcgagaatttgatttttaattttagtccctgtgttttctagattagccgcattgacagaaatgtagccagcgcgcctgcatccccactttctcctcttcatctaagaggagtgttgcccgtggggacctgccagagggtaaagggtcaggcactgcactgccctcgagcgctgtgtggcttttcagcttggtcagcatgcacttattcacactcacatggcaattatttaccacttcaggttgaggcttacaatcccttcctcccgtggacaaagcatgaatgcgtggtgtgcctgtggggctgcgtgcccaagcccgcccgtgtccggcatgtggtgtgtcattcacgtggctccctggccagtcgctgcttcatgagcttggaggcctggctgtgtgcacccactggtcattcccagggacctctccacggcagtcacagctgctctctgaaggccctgaggccttggtaaaaattaagaagccgtattttctaaaggagattgcgggggcatactgttgttatgagtgtttacaataacgatagtgattgttttacttaatgcattaacacatacacatgtgcgtgtgtgtctgcaagagacaaatcgtttgtacagtgacttctgtctcgtcagttctaccaattaaataaatttaatacaacaaatacttattaaatacctgctacagaaaccctgccaggctccagggacaccaaggtgacaagttagagggcccggcctccgagagtcatgatctccacggggagacccagggtgtacacaactaactgtggctgggccagccgtggcgtaccccgaaatcattacgaactgtacgctgtggccccggaaggagcagccattaattgttattagaggaattgaagagggattcgcttacgaggtggagtttggaacggggactgaggaccgactcaggtttccctcgtcaggtatggaggagagcagtgctgagggtcaggcagtctgtggctccggatgctctctgtgtatcagtttgtggtggaattatttttatacttgctgtgcttctaccacgtcggtggatatttcttcttacggagatgctctgagtattaaaatcacagccagtcttgcacagtaaggggaggcagatgaagagtcccaaagtccccaggagtgattgccactgctgtcactccccgcccgaatgcaggatctctgtgcaaaccacacagcactgttaggagttccacatttcaaatgattgccacatccccagcaaatagacatttgtgcgcatgtgtgtgatgcacatgtgcacacatttgtgcttgtgtctctgtgcacacgtatgtgtgcacatttgtgtatgtgttaatgtgtgtacacgttgcaggagacaccggcaccagggagcagatgagtgagactctgcgcaggtcagtggtcacgttagggaggttagcatgtgtagcggatggcagtcctgctgggatgtgcagagacaggtgagctcagaaaagggaccttggccctgcctggggacaaggagctgtcagactgcttctcaacttcccaccttgtgcagacactgtatgcaaagacaggccacatgggtgtgtgtcatggggaactgattattagattgtaatgttaaattgcatcatacctacatagacttatgaaaatagttgttgaaggtggggtgcagtggctcacacctgtaatcccagcactttgggaggccaaggtgggtggatcacctgaggtcaggagttcgagaccagcctggccaacatggtgaaaccccatctctgctaaaaatacaaaaattagccgtgtgtggtggcacgtgcctgtagtcccagctatttgggcagctgaggcagaagaatcacttgaatctgggaggcggaggttgcagtgagctgagatcaggctactgcactccagcctgggtgagagagactccgtctaaaaaaaaaaaaaaagaaagtaagaaagtaattgttgatattaaacaggcaaattcaactatcctcagatctaccttggaatgccatttgctctgattttgcctctgttgttcaaagtattgcttgaattccattttgttatccaatatattattgcatattcttttttctcttaagctttttattttgaggttgtacattcacatatagttataggagtaacagagagatcccgtgtatccttcagccagttttccccaatagtaacactgcataactatggtactgtatcacaaacaggaaactggcattgatacagcccactgaacttacacagattcctcctgtttatatgcattcgtgtgtgaacattgacatctgtgccatttattgtgtgtgtgggttcgtgtagccaccaccagagtcaagacacagaacaactccaaccctgggtcccttgtgctatgttatatttataaccacagccacctcccttccgcctccaaggccttagcccctggccaccccgaatctgtactctatctctgtattgttatttggagaaggttctataaatggaatcacccacagtgtaacctttaataactgatgttctttactcggcttgattccctggaggttgagttgctgcttcattttcaagtttgggttccagccaccatgcgtgctggtcagtggctggttcctctttgctgcggcgggatatcccatggcatgacgcaccacggtttgttaagcacttgcctgttgaagctcatctgggtttttccttgtttttggcgattatgactacagttgcggtaagtattaatgaacaggtttttgtatgaacaggaagttttatttctctcggctcagttagttttgtgtggagctgctgcacgtgtgatgccatgacagagcgtgagggctcctcctctctgcgtcctccccagcatttggtgtcatcatgcgtgttcttttaagtgtcttccatggtgtgaaagtgttatgattagatagggaatttgatttgggggaacgtcggtctggtgaatacggcacaggtgaaggctgccctttggggtcaggctccaggtgcttggtggtggttttgtttgcctccttttggcatataattggcaccaagaacagctccaggagatgtttactgcacaaagcttctggccacctgggagtgcccgagaatgccacacggttccccacactcacgtcgctaccactccagctgccatcacgcctgccatgggtgctccctgcagactagaggcatgccccacaccgcaggaaatggtgttaggggctcctgtcctcctggccatttcagcttttgcctgtctggagcaatctgatgtcctaatttccatcacccctcctgtgtctgtctcagcactccaacaagcagaggctgaacagggcaccccaccagtcgcctttagctcctgctagtgggaacagcgaaggctaaggaaggaacttatagagccttatgacccagtgtgccccccagaacactaatcagacatgctccagagccaggcagcctatggaagcagacagagactagctgggaagtactgagtccggtttctcgtcctcacccactcctcgggagcagtagggtctttaggaagtcactcatttctctagctcaaaccttcatccctgaaacggcgatgacgttgctcagctgatggttgtgtggcagggcctctacatggtgtccaccaagagtccagttctgtaaaatatttgaagagatttattctgagctgaatatgagtgaccacggccctcagggggtcctgggaacatgtgcccaaggtggtcggggcgcagcttggttttatacgttttagggagtcatgagacatcaatcaaatacatttaagaaatacatgggtttggtccagaaaggggggacaactcgaagcaggaggcttccagactgtaggtaaatttaaacattttctggttaacaattggttgaatttgtctaaagacctgagatcaactgaaagggatgcctgggttaggaaaaaggaccgtggagactcaagttcttattgcagaggaaacttcaggtggcagcttccgagagaacaggctataaaatgtttcctatcagacttaaagcctgtgtcgatgttgatgccagagaggtagaatgaggcacgtccgatccccacttcccatcatggcctaaaacagcctttgaggttaaattttaaaagagccctggctagggagaaagtccgttcagatgggtggggttcttagagttttttatttctgatttacagtggaaatgtgtcccttactatatttgctaaggaagatcctaaaaacaaggcagtgccggggttcctgtaagggcccctcaggtccccgccagccctggtgctctgcagctctgcccggcagggatggagcccctgagctggccttagaggacctgccccatcaccagccccacttagacgctcctgtctcagcctcgcctggttaacccttccctctcaagtcaccatgctctgccccaccctgtgatttcttgccattttgcccaattttttgtttttgtttttgttttggagatggaatcgccctctgtcacccaggctggagtgcagtggcatgatttcagctcactgcaacctctgtctcccgggttcaagcaattctcttgcctcagcctcctgagtagctgggattacaggcacccaccaccacgcctggctaatttttgtatttttagtagagacggggttttgccatattggccaggctggtcttgaactcctgacctcaggtgatccgcccacctcagcctccgaaagtgctgagattacaggtgtgagctgttgcacgtggcccgttttgccgttttatcttcgtaggagttgccgctgctcagtactcccgtctctgttctcactcacgtgtggtgttctctgtggacgctgagcctctgcagaagctgctgactttgtcaggtccgaggctgtgtcctcagcaccaaggacagcacagggcggacactccgcgtatttgagtgagaaaatgaatgctttgcaacaaccatatcgtattgaaccgttctgtgaacgaggcccctttgctagggctttgcatgcattacctcactcatgcaaatcctgtaaagtagggactgtcctttcccatggccccaagagattaaggtaaaggtatctggaattactcactcctacagagggagtattcaggattcatagccagaagtctcgccccagaactccagaaacactgggatcacctccctgttgaatgaacagaaggagccatttgtgttcctcacagtgtgattatgaaattgtctctgttcctgggaatataaatgtatcttcatgacagtaagcgttgaggatgtttcagtatttctagctggtccttttggttgataaacattaataaagtatgctgtatatgggaattaagcattttgaaaataacaaaatgcccttctttttaaacctgctttcccctctctacctctggtttgcttcttcgtcagctatagtgacttgtgggagagatggtggacttcaaggcagcagacctagggtggcgggctctcgtttcagatttacaggtagttatttgtagtgttccaactttgggcaagtcatttctgttgaggccttgttcccttgtgtgtggagtgggggtggttgtggggcctcggattctttccagttctacgtttattagatgtagaggacatttatttatttgtttattagatgcagagtctacatttattgactgttgctcagtgccacatcactttgtttttaatgaatcaaaaataaattacagaccctcttcccaccctccctttagcctcacagtggctgacacccctgctactccagccaaggcagcctgcctcaggagtaggaacttacagagggcacggccgcagtcttctcgctgaaaaggactttggaaatcattcagatgagttccctctgtggatgaagtcagttcagcagaccgctggccgcctgggtggaattgaactgaacactcccttgggggtgcttttatcaaattatgcccatctagtgtaatgttttaactatttttcagtatatctcacactgttatattttattttatgtgtgttagctgcctctgttagtctgtttgcattgctataaaggaatactgagactggataatttattaaaaaaaaaaagaggtttatttggctcagggttctgcaggctatataagcatggtaccagcatctgctcttggtgaggctttaggaaacttacaaccatcgtggaaggtgaagggggagccaggacatcacttgttaggagaaagaagcagctgccagactcttttaaacaagcgaatcttgtgggaactaactgagcgagaagactcagtcatcaccaagggacgggtgctcagcctttcatgagggatccgcccctgtggtccagtacctcccactaggccatgcctccaacattgggatcacatttccacatgagatttggaggggactaacattcaaaccataccattctgcttctgccctcaaagagctcatgtccttctcacatcacaaaattcaatcatctctttccagtagtcccccaaggtcttaacttgttccagccccaactcaaaaatccaaagtctcatttgagactcaaggtatgggctgtaaaatgaaaatcaagttatttactttcaaattacaatgggggtgcaggcattaggtaaacattttcattccaaaaggaagaaatcagccaaaacagaggggcagcaggccccatgcacgtctgaaacctggcaggaaaggtattaaatgttaaagctccaacactgactccatgtcctacgtccagggcacactggtgtgaggattgggctcccaaaaccctggccagctgtccccatggctgcctgcatgggttggagtcaagtgcttttggtttttccaggctcaggatgcaagctgcttctggctctaccattcttgggcctggagggcagaaggttccttcctacagctccactaggcagtgtcctaatggggactctgtggggacttcaacctcacatttcccctaagcattaccctagtgcagtctctctgcagtggctccacccctgtggcagtcttctgcctgggcacccaggctttcccatgtatcccatgaaatctaggggaagctgccaagcttctttcactcctgcattctatgtacccacagacttagcaccatgtggaagttgccagggcatatagcttgcacctgccggaactgtacctatggcccctttgagccatgactggagctagatgcagggagcagtgtcctgaggctgcacaaggaagtggggccccgggcctggccttggaaaccattatttcctcctgggcctttggaccttggatgggaggggctttccccctcccaagatgcctgagatgtcttcaaggcctttttcccattgtcttgactattagtgcttggttcctttttagtcatgcaaatctctctagtaagtggttgctccacagccctcttggattcttcccctgaaaatcctctttgcttcttttctacatggccaggttgtgacttttccaaacattatgctttgattcccttctaaacataaataccaactttaagtcatttatttgctcctgtatctgattgtaggctgttagaagcagccaggctacctcttgaatacgttgcttctgagaaatgtcttctgccagatactctaggtcatttcttttaagttcaaacttccacagattcccagggaatggacacaatgcagccaagctctttgctaaggcattaacaagggtgacctttgctccagtttcaaatagcttcctcatttccatctgagacctcatcaggccttcactgtccatatttctataagcattttggctacaatcactcaataagtctctaagaaattccaaactttttctcatcttgctttctttttctgagccctccaaattccttcaacctccgctcgttacccagtctcaaagctgctccacattttcaagcatcttcgtagcaatgctcccctcctcagtacctatttaatgtgttagtccatttttgtattgctatagggaaatacatgagactgagtaatttataaaaaaagaggtttatttggctcacagttccacaggctgtacaggaagcatggcagcagcatctgttcctggtgattctttaggaaacttacaatcattgtggaaggtgaaaggggcccagtgcatcacatggtgagaataggagcaagagagagaatggggaagtcccagactctttatttttaatttaatttagttttcttttttttagacagtctcactttgtcgcccagtctggagtgtcatggtgccatcttggctcactgcaacctctgcctccgccttccagtataagtgattctcctgcctcagccccctgagtagctgggattacaggtgcccaccatcacgcccggctagtttttttgttttttttctttttcgagacggagtcttggtctgttgcccaggctggagtgcagtggtgcagtctcggctcactgcagcctcttccgccagggttccagtgattgtcctgcctcagcctcctgggtagctgggattacaggcgcccaccaccacgcctggctaatttttgtacttttagtagagacagcgttttgccatgttggccaggctggtctcgaactcctgacctcaggtgatccacccgccttggcctcccaaagtgctaggattacaggcgtgtgccaccgcacccagctcatgcccggctagtttttgtgtttttagtagagatggggtttcaccatgttggtcaggctgctcttgaactcctgatctcaggtgatccacccacctcggccttccaaagttctgggattacaggcgtgagacaccacacccagaccccagactcttttaaacatccagattgtgtatgaactaactgagcgagaactcactcaccaccaagaggatgctgctaggctattcatgagggatccgcccccatgccccaatacctcccaccaggccccacctccagcactggggatcacattgcaacatgacatgtggaggggacaaacatctcgactatgtcgctcccttaaattctttctggaaaagatgggctatagataaataagaagaattaataaaattctaccctttgactgttacagaaattgaggctaaatgagatgaataccaacgtcacccttataattgataacaaatttttactttccaagagtagataagaaaggtttctttaggacaccttttaaaaatattgtatatggttattcttctattaaaggattaggtttctccctgagtcaatgattaaactgatagctaaatgcatcttatcaatatgtagagtgtacatattgatagtgaataatgagcaattgactgtggacccaccacatcctctaatgcttcccagcactttgcacctacccagctcatgtttacaccagtgcccttcggagccctgataaaggggaggtttcctggaactctgcaggtaagagcaggaaggaggtaattatcttctgcaagtactgttctcttgtgtcggcttgctgtgaagttgggatgtggtgtctccacaatgcatcatcatcaccattggttcgatggctgattagccacaacagggtaattttatggttttccatcgccctttgatgataaagaggctctccagctgttcaagagttatgcaccttcactgtagattaatgctccctgctggctagtggaagcaacgtcaaaataatggaaacctcggcgcattcttgttgtgctccgtttcccaagtggtatatcaagagtcgtcctagaaatcgccttgtttcttggatgatgaaaatctcctttaaaggcaaagttactagaatccataataagaagcttttgagggatgggagtgaagtgaatgacagtggcagctccctccctctctccctccctctctccctccctctctccctccctctctccctccctctctccctccctctctccctccctcgctctctccctccctcgctctctcctccctcgctctctccctccctccctccctccttcccctctctccctgtctccctccctctctccctcccttcatccttccctctctccctccctctctccctccttccctccctccctccctccctccctccctccttccctcccttcctccttccctcccttcctccttccctcccttcctccctccctccctccctgcctccctccctccctccgtttctccctttctccctcccttcctccctctcttcctctctccctcccatggctaccaccccggcagggaggaggctacagggaggagtcctgtgggctggagctgagcaaggctgcactccacacgctgtgtgtttctctgacatgtccaagtgcccgtcacctgcatggtggctagctgatctctgtgtgccatctgagccagtttctgggggaagacaatcccctcagtgtagatggaggtaaatatcacagtgaaatgccagacaggctgagagcatttagcattacctgggaaagcagggtgtacgtgttaagattattatcagaagaaaagaaaagggcacagaaggcggtattgaggcagggggaaggaaagcagtgtgtgtggctccgccaggcacagggggcattttgttcaaaaagcaggatttggcttcagctctcttcatttttcctcattttagtttagtatgacagaacagtggaaattggctcaggttaaatgttacaaagaggagtgaactgatagctatccttcccattttgtaaatgttgtgtttgaggataagtagtaagaaaatgtgctcgaaagtctcagagaccctatgatatgattctgctattaaggagagtagggaattgtctgtgattatggcagtattgccactgaagatttattaggttctttttttgagacggggtctggctttgtcactcaggctggagtgcagtggtgtgatcacggctcaaccacagcctcggccttccaggctcacgtgatcctcccatctcaacctcctgcaaagctgggaccataggcatgtaccaccatgcctggctaatttttaaattttatgtagagatgaggtcttaatttctaaattttaggcagagatgaggtctccctacattgctcaggctagtctcaaactgctgggcgcaagcagtcctcccacttcggcctcccaaacactgagattacaggtgtgagccaccgcacctggcccagattcttgtaagaaagatttacatcagtgctggttggctttagccagcctagatgcgcttaggtgtgaagtgcctcacactggcatgctttcctggttactggctcctgagcagagttgtctattagctttccaaaggagctcagaatgatgcctaacatcccttagtttgtgcaggaaaagaacaacttgtgttattacaggagaatagaaaaatgtcttctttcaagtttgtttaaagtctccatttaaaatggggaatgaggctgggcatggtggcttatgcctataatctcaacattttgggaggccaaggcgggtggatcacctgaggttaggagtttgaaaccaccctggccagcatggcaaaatcctgtccctactaaaaatacaaaaattagctgggcacggtgatggctgcctgtaatcccatgtactcaggaggctgaggcaggagaatcacttgaactcaggaggtggaggttgcagtgatcccagatcgctccactgcactccagcctgggtgacagagcaagaccccatctcaaaaatacaatacaatgcaatgcaacgcaacgcaacgcaacggtaaagtaaaataaagtaaaataaataaaataaaataaaataaggaatggttatcagagtctcccttgccccatataaatgttattaaaattaattattagaaaggagatgatgagaaaatactttagtaaaatgcaaagtacaggcgcaacttattctaggaagagtcataatacaaaaatctaaatatacagtgcagaaaatatagataattacttatattgcaagagaaattcctatctcccctaggattttagttcaatttccattaaataatgtggttcaaaagtatgtttttgttgatccttttatgaagcaaatgggtgttttaggtaaagagaggcagatcggtgtgtccaggcgaatggctcagaaaacgccttagtccatttgggctgctttagcacaatcccataaaccaggtagcttccagacagcagaaattcattgttataagttctggaggttgggaagtccacgatcaaggcgctggctaagttggtgtctggtgaggcccctcttcgtggttcacagatggctcctttttgctgtgtcctctagtggtggaagggaagaaggagctccctcaggcctctttgataaagggcactgattttgtttgccaaggctttgccctcatgatctgattaccttccggaggctctgactcctaatactttcactttggggattagaatttccacatgtgaattcttgacggggtggggggcttccaacaagaacatagcagaataagtttttcaaaattctatttgtgatatttaaacttgaagtttaaataattttaaaatgttatgcctgaaggtatactaaccctgcatgtaaggaattttaactagagttgacttttcttctatgtttaataaacaggggtcaggggaggagaaagagaagaagtagaagaaaaaggagaccaaactgctgttcaggttttagacagcacattttacctagaaatgtgttatgattcagaggctatctttggacttgctgagaagacccagggagaagactgtttgatatgttaacgtttccctggaagtcctttgctgatgcagccgtgctctcccacctgcatcctgggaggagctctgcagtgagggagcccctgtgggcctgggttgtcacagccttagagaggagacaccatgtgaacccgagagaggacacaggtgagccctggggctggtgtgagttctgtccgtcaaaagggcattctgagccctgcctgtgctcctccaaccctctgtgggatggagagtcaggactgtgaggcctccagcatggagccatgtcctggacgtcacagcagagccatgccctgtacgtcacagcccatatctgccccaaggacaggcttgcccgggttgtggcccatttcccaccagaggatagggttttgaggaatggagggctgggtgattagggccgttgtttttctgcctacacactgataaatggtcctggttttgcttgtgaattctttttaaatttttaaaaaaaatttttaatttaatttcattttgggttttttttgagatggagtcttactcttgtcacccaggctggagtgcagtggcgcgatctcggctcactgcaacctctgcctcccgggttcaagcagttctcctgccttagcctcctgagtagctgggactacaggcgtgggccatcacactcagctaatttttgtattttttagtagagatggggttttaccacgttggctgggctagtttcgaactcctgacctcaggtgatccacctgccttgacctcccaaagtgctgggattacaggtgtgagccaccgtgcctggccttgcttgtgaattcttagtgttagagtgcttgtttctgttgagctatgcccaagttctatgaagcatatacttaggctgttaattattgatgtcagtctccacaaaaaagaaaaaaattggagaaaaaagccattcccctcatgtgcagcccgtatcttccttttgctttctgtcagactttaaacggggttatttggttgatggagctatatgtttgtcccagtgagagatgtctgagtaaacacagacttttaataactgagttacccagtgtcaaacttccatgcttgcctgtcagaaagcgttcccaggaagcatagaaacatgattctgttcctggaagtattccataggtcccaacataaagaacttgtacatctgcagatttgatcaaagggagcctggggactgaacggtgtgattctcggagtttccttttttatacttcttgcacgtgtggaaagctgtcacgtgctttactgtggctttgcaagcaggaagaaattaaccacattgccaagtctgtgtgttgtaaacgatttgtaagctggggaaataattcattatattctcttttaaaagggtttctcaaagttcaactggtaagcaatgacataatcaccatcattggatagatacatatctttcttaaggcttctccttcttcagtacagtaataaacttgagttttaggaagcatttggaatcttagtctgagcacaagcttccacgccatctgaaatctctgtcttccagccgtcgatggctgctgcctggtgtgtggtgtggagtcaggggcctgaaatctctgtcttccagccgtcagtgggtgtggagtcggaggcctgaaatctctgtcttccagccatcggtgggtgtggagtcgggggcctgaaatctctgtcttccagccatcgatggctgctgcctggtgtgtggtgtggagtcgggggcctgaaatctctgtcttccagccgtcagtgggtgtggagtcgggggcctgaaatctctgtcttccagccatcggtggctgctgccaggtgtgtggtgtggagttaggggcctgaaatctctgtcttccagccgtcagtggctgctgccgggcccatggtgtggagtcgggggcctgaaatctctgtcttccagccgtcagtggctgctgccgggcctgtggtgtggagtcgggggcctgaaatctctgtcttccagccatcagtgggtgctgcctggtccgtggtgtcgagtcgggagctcctgttctgttaggagctgtgcctcttgccatttgtcctggtacctccccttcccatcctacatgacggcggggctaggaggcatctgcacaccatcgaatgtagtcgattttgtgttgaggttgttctgagaatttcttggtgtccctagagttatccccaccccacgtgccagagtccagaatggtgaatcactcattttagaatcacttatttgaagaagaaaagtatgcattttgtttgatcagcatgaaacctgccgaattaggaccatatcccacgatgatgacccttgtgaatgcctcaaagaagttcagcttgttatttgcttgtttcagtttatctgggcttattgacacagcccatttccagcaccttcctctcagtggcaatgaagggatgctgcatactcacatcaggtgtgcgccacctagttcctgacttgttcatatcgttttatgtcctctccaattcagtgggagagactgataaagcagaaaagtgggtgatttttacgaacaaagaaataaacgtcttagtttggagtagcgagtattgcagaaattctaggttattttctcatgtttatggcactagtttcatggtgatggtccatgataaaatagaaattctctttttattgcactttgcatactccagttattccaaggtatacggcaaacagtaatgattatagggattgctacgtataaaataacagcagttatttccagatgtatcacccatggataaatagtgaaagatacgataaaggagctctccctaccataattctggctggcagttgggcccccatggattacctcgtggcatctgcatctcagctctgcggaggtgccttcaaaatgctttgttttaggaggtaccagctggctttgctttaggagggacctgctcgctgttcttgaggaaggatctgctggctattcctgaggaagagtctgctgcttttctttaggaaggatctgctggctttgctttaggaagagtctgctggcttttctttaggaaggatctgctggctttgctttaggaaggatctgctggctttgctttaggagggatctgctggctttgctttaggagggatctgctggctttgctttaggagggatctgctggctttgctttaggaaggatctgctggctttgctttaggaaggatctgctggctttgctttaggaaggatcttctggctttgctttaggagggatctgctggctttgctttaggaaggatctgctggctttgctttaggaagggtctgctggctttgctttaggagggatctgctggctttgctttaggagggatctactggctttgctttaggagggatctgctggctttgctttaggagggatctgctggctttgctttaggagggacctgctcactgttcttgaggaaggatctgctggcttttctttaggagggatctgctggcttttctttaggagggatctgctggcttttctttaggaagggtctgctggctttgctttaggagggatctactggctttgctttaggagggatctgctggctttgctttaggagggatctgctggctttgctttaggagggatctgctggcttttcttgaggaaggatctcctgctttgctttaggaaggatctgctggctttgctttaggaaggatctgctggctttgctttaggaaggatctgctggctttgctttaggaagggtctgctggctttgctttaggaaggatctgctggctttgctttaggagggacctgctcgctgttcttgaggaaggatctgctggctgttcctgaggaagagtctgctggctttgctttaggaagggtctgctggctttgctttctttaggaagagtctgctggcttttcttgaggaaggatctgctgctttgctttaggaaggatctgctggctttgctttaggaaggatctgctggctttgctttaggaagggtctgctggctttgctttaggagggatctgctggctttgctttaggaagggtctactggcttttccttaggaaggatctgctggcttttctttctttaggaagagtctgctggctttccttgggaaggatctgctggctttgctttaggaagggtctgctggctttgcccagtgttctagtttcacatcaccctggagaagaacaaagagacctgtttatgtgtttgaagcttcatatgtgaatacatgtcataggaccagagacccatatatgtaaggaaggagatggaaagaaaataagagttaggagaagcctaggttggggttaatgagcagccaggaagggggatgccctgagtgtctgcaccgtgctgagggcagggccacatgtggaaagggggttaatgagcagccaggaagggacgccctgagggtctgcaccgtgctgagggcagggccacatgtggaaagggggttaatgagcagccaggaagggatgccctgagggtttgcgctgtgctgagggcagggccacacgtggaaagcaaacaggcacccgggatgtccatgcagagcagacgcacgatggccaaatcagaagacggatccacctcatggccaaatctgaagacaaaactgccggcacactgagcctccttcctgtgtctaagcgtctgtgcatcaaccacagagatggtcattttactaagaaagtgagcctgggttgtctgtgctggaagattccccagccgtatttcctgtgtgaaggcggcttttatctgctctcccttctgtgtgtacctgtggggttttgtttgcttttcttttcctacatattttaatttgtgaactggcccatacccacctgtaatattgagaaggggaggacacagcctgatggggcctgtccccagaggtcccagacccttggcgcctccttgtccctgtcgatccactctcagactctcccagtggccgggtggggtctgctgtgcaggcggccgggcagagccaggttgcgtcccatccttggccgtggcacctcatctgttgactgtgggtttttgtgtgttttctttttccttcaacatgctctccccttccaggctctcccagagacttcatgccgagcttagatagtcctggaaggaagcctctgggagtttctccatcccgggctggctggctcccttcttaacacaatcttttccaaggctaggtagtggacggtgagtggcacggtgaatgtaaggagccggagggcccgctgtccttgcccgtcttgtctgggaatctcagggcatgcagatgatgtggccagttggcctcttgcagcatggaaagcaagctcctttctcttcacactcatgtaattcagagactgcaagatgaaccctttcagaaatgaacggcgaaggttcaaaggcatcccttgattcataccctgaagttattcagagttaattttccacattggacgcttcctctgtgaaaacaaaagtctctaaattctcctgacagtggggagaccagaaggaaggctgcactctgggccacagtggcagtggggtgtgcatggtgtatggcatctgagagagaaggaatgtgaggaaggtcccccactttgtgcattagccttaaaagcagaagagaacaatcagcatccccacagggacccacagcccagggctctgggatgggaatcacctgtgcaggcgacaggacctcccgcggctctggagtgtcaccagcccgtggagggagacaagagaggcccagctggccgatgtaggtggaagagcaccaggggtcacgggcgctccggaaagccgtgttggtgactccggtcctgagctgctgggtaagatgtgggtaggatggccacacatgattgagtttggatgcctttcggaacagatgaaacattgagttttagacatctcttggaggtttttttcttcttaaaatatacctccatggaatttttttggtgcatgcaaaggtgatcatttcagtgtccagccaaattttcaagaagcttttacggttttcgtgagggaggctgttggcatttgggtgagataagcctttgtcgttgaagctgtttgcacatttggaaggtttgtgaaaccagaaatgtccttcaccccttggatttctcaaatccccgtggagggcagcaccacgttcagcctgaggagcacagatctcttcgcgtctgataacagcgagggcttattgaacagcagccgtgtgcgggcctgttctcagtgttgactgttgaccatcccaaacctgtaatgtcagtttactgctattctccccgctggacggaagcggaaaccaaggctcagagagatgcaggcaccaagggctcaatccttccaggctgctgcagactcatgtgccgcagcattccacgcttgcctctcagcgcgttccatgtaattgccatgccgttctgtgctctcctcttagcgcgttccatgtgatctgtgctcttagtcatacagcagtccctgttccaagaccctagcggacccctgaaacggctgatagtgtggaaccccagacgtacagtgctttttcctgtgtgcaatacatacgataaagtataacttgcaaattagatgcagtaagagctcaatgcagtaatggctaataaaatagaacacctgtaacaatagactggactaaaggttctgtgaatgtggtctctctctctccttgtctcccaatatcttgttgtactcacctatttttagactgtggctgacctcaggtaactgcaactgtggaaagcgaaactggataaggcaggactgccatatgtatggtgtgtgtgtgtgtgtgtgtgtgtgtgtgtgtgtgtgtgtgtgtgtgtgtagttttcaaaatacagcttaatcctgaaaagtcagatcttctttcctcaggttaatgatttgtggttttttctggacagttctcctcgccctccccatctcccaggtggacctgtgtggggatcactcagtctaatccctccctgggtgcgtctttgtgtgccttgtgaggagctgtggcggctgctgcagccaccgtaggaaatcacagccacccggctttgtttttctcgtgtgttaacatggtacaaatcagtatagtcagcagctttgaaggtaccagatagtgttgccttagtccttttgcctaatggtgatattgaagccaacaagcttcctgaaaattgtgagctttcaggccacgtgcagacctcaagatactgagtcagcccttggttgactctcagctctgccatttatagctttttaatttggggctggtcactcatctttctgtgtttgttacctcatctgtacaataaggaagagcgtaggagtcacctcctaggctcacagtcagtgtgagaaggagaatgctgtccaggtagcccagggcctgcaccgagcagacgccttgggtgccacctacagtgaagctggccctctgggatcctgtcctgaaatggtacctggcctgcctggtcttgcccacgattgcgtcccttctgttccctggcccgagttgtgtcctgccctggccctgtagtcacctttctcaggtgtggttttcagccaggtccttgggcattgctcacagatccccatgtcctcctcctgagtgaagtcatcacctgggctgagctctcatggctgtcatcagtcccagcctctgctcatgtccctgggccaggcagcgagggacaaggatgaggactgggatttgttcctgacttgccagagatgccatgttggccaggttccttaacagaactctctgagcccagtttcccatctttaatcattgttttcctgcgcagttcatgctttttcccacatattcttggtggatataacagtattctgtagactttaacatacagtacacgtacggcgatgtcatgacagcctccctgcctcacagggttgttcagttctgtgctgcgggctgtgactgttcatttctaggtggcgggagagtggtgtggtgccagcaccttcatgcatgtggaggcgctcttagcatgtcaacaggagtgcccgggtgttgatgttgctcttaccgtgattactagtgcccatttggcaaaacccacttttctccacctaagtcctgctccgagggtctcactgggagggagagctgtcgtaaagctccagctttcatgcagagcttaggatgcaatggtcaggtgatgggtgctaatttggggcattctttacctctggaccaagtgctgacatgggtcaataaataccaggaaatctgattaataacaaggaattattgctcaaagaaaaggattttgatgtcctttctggtaattttgttcatttgtattatgtgataagcctttaaaatcctgcattctataataaatgtgtggaatcttaaaataagtttggcaaaaacttagagttgaattaagttcatttgagacttcttcaaagagctgtaattgcaggggcaccacaaggtttccacgcttgtcgggtgctttgaaaaattaggcagtgctgtagcgtggacctgaaggacctggcccacttgagcacttgccagtcaccttgggaagtcgctgagagctctggctattggggggtgtgtgtgtgtgtgcgcgcacgcgtgtgtgtgtgtgtgtgcgcacccgcatgcacacatgtttgtgtttctaaaggaaacctttggtaacacagaagccacccactgctgtgcagatggtcatagctcttattcttcagatgaaggccggttgaggccaagaagagggaggagctgaggggatgtgacctattcctgtggctccatgtcggcgtcacctttttaagtcatttgtagcactcatctggctcatacatctttgaagagggtagtgagtgaataacaggtaagcagccatcagaggttgtcattttctttttccttttcaatttgcatcttccagagtttttgatgtgcaagtttgcatgttagtctgaaactgttctaacttgccggtggaaaacacacacagacttaaaaggcaggataattaccttgctgaaattcttttctcaccttttatgaaagagaaagctattttcttgaggagtcaagttcctatcccagcaaggaaaaactgatgacagattagggatgtggccacaggcccgggaccagctggttagctaaactctctggagtgtcttttggaggccatggccttgtgacctcagagatgaacacttacttcaaagcacaggattttgacactcaagagagcaggtctcttgtgcaaagtaggagcatcttccagtgcaagggcagggcttggagagagactgcagaggcttccgcggagtggggctcagttttgtgaatgctgccgcttgtaattcaacagcgtcccgcacttttacagtgtgtgctgtagtgacgcaggggctgcaggggaccccaacaggagtgagggatgagactttctttttccccttctatcagggtgttgaccgccacggccctgggctctggcagcctgggtctggtcttatttattgtgcattcaccatgttgggcctccccagtgtggagcgtcgtgacacagggccctggctgccggagcctcgatgcgatgtcctcccacgtgggtgtccccagccgacacggagaactcctgcctgctcttggggactcttgcctgttgttaaagatggaaaaggtagagaaacaagaaggaattctgagtggttcagtcagacatgtttaaagcaaaaagttggcttttcagtttcagaatttaagcatgcgatgtattaggtattttcagccagtgacattgagcgacacaaaccacaatttattggtaaaaaaaacagcaaaatacaagacatgccaaacacatgtgccctcattcctgcaagttttttgttttgtttcatttttaattctagcagtaatatggatccacaccacgccctcactctgtggccctgggcctaatccagcctgctgcctgcttgtgtaaataaagttctgttggatcctggctgctaccctttggtcatatattgtctgtagccacttttatgttacagtgacagagctgagtagctcagaagcctgacctggcccacaaaactgaaaatacttgtcattgagccccttatagagaaagcctgacacctgctcagggtgctgagaactttgactcctatctttgagatttttaaagttctaagggaaaagtaagtaacttctctattgctgtaattcttcacccacttaggcctcagctcactggacattttacccagatggaactttgatgaagaacaagtcaacagactttcctttgaaggctccttagcttgacttccaaaatagatgcaatgaatgaagaagcaattcacagatgtgtgagaagcagccagtacacacttgacgggtggacaaacttcctagttgttagaaaacgcagattaaagcagcgaagacataccctgtgaggttggcttggggaagggatcagcacggtcattatcacagttacggctgggatccagtgtccctgagaatgccgggggaaatgcacattctaggaagacaatttgggaaacatgtctgtgttttggcccagcaattatagctctaagcacttaccctaaagtgtgccaagaagtctttctccaggatacttactgcttcattgtatgaatcaattgtgtgaaaaattggaaacaactgaagtggcatacatgggaattggattaaaaaattatggaaattcacacgatagaattctgtgtgccctttggaaagaattatatctatttgatatggaaagttacccaggatatattttaagttaaaaaaaaaagcaagttgcagaataacattaatagcctgatcacatgtttgtaagtaatgattatgattgtattatacataccactgtatgcatagaaaagacctggaaagctgcatatcaatcacttattaacagtagttatcatctgtgggtgggagtatgagagacttctacttttctaaagttttaaactttttaatgggcatatatgactttgcgtttacagtgtaaagtaatacagcttaacgtgagacttcgcaaaggcaagaggcttcttgtgttttactcagaggagaacttctttaatgcccacttagggctatttattattttgttagcaaaactcgttacatctaagtgtatgtgcttttcagggtggttgagagaggagagaagccagtgcagacagggacacacacagaaacagagacggagtagataaccatccacggggctgctgactaaattttcataaaagcaaaccctattcaggcctattcaacatgggggaaccggctctctcccctgagaggagagtgagtgtgatgctgtcctaacagtgttgaaatgggtcataactggcctgtgctcagtgaagcaggcaaaagacggatgatgcacctcaacgtaaattctagccaaaaagcctaaaataactaaaaagagaccaacattgaaacaggagatcaaaaaatatcttaaggcaaatgaaaatggagccacaacataccaaaatgatgggatgcagcaaaagcaggtctaagaaggaatttaatagcaataaatgcctacatgaagaaaaaaagaaagatctcaaataatcaactcaactttatacatcagggactagaggaaggaacaaactaggcccaaagttagcagaaggaaggaaataacaaaacccagagcagaaatatatgaaatagacatgagaaaagcaattgaaatatcaaaacttagagctgcttttcgaaaagataaagaagttgacaagcctttagtgaggctaaagaaagtgagaaaacacaaacaaaatcagaaataagagacaatataaatggttccacagaaatacaaaggatcataagagactactgtgaacaattatgcgtaaacaaattggataacctagaagaaatagaggaaacatacaacctaccaagactgaataaagacgaaatagaaaatctgaataaatcaacaatgagtagagattaaatcagtaatcaaaaatctcccaacaaagaaaagcccaggacctgatgacttcactgctgaattctgcgaaatattttaagaagaattaatgtttgttcttttcaaattctttccacaaaattaagaagagggaacacttccaaacttattttatgagaccagcattagtctgatgttaaagcctgacaaagacactactagaagagaaaattacaggctagaacatctgatgaaagtaagtgcaagtcctcgataaaatattagtaaaccaaatacagcagcacagtaaaaggattatataccattattaagggggatttgtccctcagatgcaaggatgcttcaatatacccacgtcagtaaatgtgatacaccacattaacaaaatagacaaaaaccatacaagcatctcagtagaggcagaaaatgcatttgacaaaattcaacatcttttcatgataaaaactctaaataaattagatatagaagtaatttacctcaacataataaaagccatatatggcatgtgtgttagccaacaactaacatctgaaaagttgtaagcttttcttataatatcaggaacaagacaaggatgcccactcttgccacttttatccatcataataactggaagttctaactagaggaattaagcaagaaaaagaaataaaaggcaaaagcatccagatcagaaaggaaaaagtatttgtagacaacatgatcctaatatagaaaaccctaaagattccactaaagcattgttagaatcagtaaacaaattcagtaaagttgcaggatacaaaatctgcatacaagaatcagttgcatttctgtatactgacaatgaaatatccaagaaagaaattaagaaaacagttccatttacaacagcatcaaaaaggataaatttcttaggagtaacttttaccaaggcagtgaaagatctgtacacagaaaactataaaacattggtggaagaaattgaagaagatgcaaaccaatggaaagatgttcagtgttcatggatgggaagaattaatattgttaaaatgtccataccacccaaaatcatctacagattcaatgcaatccccatcaaagttctgatggcatttatccatagaaacagaaataaaagtcctgaaattcatatggaaccccaaaataccttgaataagtagactttgagaaagaagaacaaagcccaagacattccacttcctaatttcttatatcataagactactgtaatagaaacaggataatatgaaattacaaattgacatatagaccaatggaacagaatagaaagctcataaataaactcacacgtatatggtcaactaacctttgagaaagataccaagaatacacaatgggaaaaagatagtctcttcaataaatggtatagttgtgtctctgtgatctgaaaatttgaaatcctatatgctccaaaatctgaaacattttgagcatgaatatgatgccacaagtggaaaattttacacctaacctcatgtggtggattatagtcaaaatgcaggcccacaacacacagtttattcagcatccccgatgggaaaagaatcctcccacccccttcagctgcagcgtgtcttttctgcacacgcacagatttccccacacacacccacaaagagtaagaaaatgtcatgtgtgcaggctggatgtgccaatggcagtttccctacagtgttccacatggccaagacgtgtgtgcgttactcaccatgttttttggttattcgttgcattgctatatactgacaatgagctatccaagaaagaaattaggaaaacagttccatttacaaataaaaaaaaataaaattttcaggaataacttttaccaagccagtgaaacacctgtacactgagaactataaaccattgataacagaaattgaagaagatgcaaacaaatggaaaaatgttcagtgttcatggatggggaagaattgtcttcttatgtgatgtaaagatagtgttgaaaatgtcaaaaaggtcagcagatacccctgtgagtaacagtgataagaaaaaaaggaaggatttgtatttatctatagcacagaaagtcatgctgttggagaaactggacaatgatgtaagtgtgaaacagaagagtaccctgttggaatgaccaccatacatgagctgaagaaacagaaggataaaccgttgaagatctgtgctgaaagtaatgaacagacgttaatgaaaaatagaaaagcaccgcataaagcaaaaaatgaagatcctaattgtgtattgaaagagtggattcatcagcattgcagtgaacacctgccacttaatggaatactgcttatgaaacaagcaaagatctatcacgttgaactgaaaattgaaaggaactgtgaacattcaacagcctggttgcagaaatgtaagaaaagacacagcattaaattttaaaagatgtgtggtgataaaacatctgctaatcacgaagcagtgaagaaatttattggcatgcttgccaagctcaaagctgttgaaaatctcatgccagaatgagtctgtattgctgatgaaacatcactgttttggtgttattgccctggaaagacaccaacttcagctgataatacaggaattaaggatgtcaaggagagaacaactgtgttaggatgtgctaaagcagcaggcacacgaagtgtaaacctggttgtgataggcaaaagcttgtgctcttattgttttcaaggagtgactttcttaccattccgttattctaacaaaatgtgtggatcaccagcaaaatcttttctggttgattttacaaatattttataccagtggctcatgctcacttctaggaagctggactggacaacaactgcaagattttgttattccttgtcaactgctctgttcattctccagctgaaattctcatcaaaaataatttctgtgtcatgtactttcccctaaatgtgactttattaattcagcatttgactagggtatattagtctgttctcatgctgctaataaagacatacctgagactaggtaatttataaaggaaaagggcttaactcacagttccacattgctggggaggcctcaggaaacttacaatcatggtggaacgcaaagaagaagcaggcaccttcttcacagagtggcaggatggagtgagtgcaagcaggggaaatgccagatgctgataaaaccatcaggtctcatgagactcactcattatcacaagaacagcatgggagaaattgcccccatgattcaattatttccacctggtcctgcccttcacatgtgggggttgtggggattataatccaggatgaaatttgggtggggacacagccaaaccatatcattctgcgccttccgcctcccagatcttacgtcctcacatttcaaaacacaatcatgaccttgcaacagtcccccaaagtcttaactcattccagcattaacccaaaagtccaagtccaaagtttcatctgagacaaggcaagtcccttctgcctatgcatctgtaaaatcaaaagcaacttaattacttcctagatataatggtggtacaggcattgagcaaatacacccattccaaatgggagaaattggccaaaacaaaggggctacaggccccaggcaagttgaaagtccaacagagcagtcattaaaccttaaagttccaaaatgatctcctttgactccatgtctcacatgcaggtcatgctgatgcaagaggtgggctcccagattccttgggcagctctgccactgtggcttcacagggtacacccgactggctgctttcatgggccggcattgagtgtctgcagcttttccaggcacacagtgcaagctgttggtggatctaccattcttgggtctggaggatggtggccctcttctcacagcttcactaggctgtgccccagtggggcactctgtgtgggggctccaactccctagcagaggttcttcataagggctctgccccttcagcagacttctgcctagacatccagacattgtcatacatcctctgaaatctaggcagaggtttccatacctcagttcttgacttcttttcacccacgggctcggtaccatgtggaagcaccaaggcttggggcttataccctctgaagcaatggcctgagctataccttggccccttttagccacagctggagcagcagcagctgggatgcagggcagcatgtcccaaggctgcacagagcaggggggccgtaggcctggcctgtgaaaccattttttttctcttaggcctctgggcctgtgatgggagcagcttccatgaaggtctctgacatgccctggagaaattttccccattgtgttggtgattaacattcgacttcttgttacttatgcaaatttctgcagcaggcttgaatttctccccagaaaatggttttttcttttctattacatagtcaggctgcaaattttccaaacttttatgctctgcttcctcttgaatgcatttccacttagaaatttcttctgccagattccctaagtcatctctctcgagttcaaagttccacagatctctcaggtgggggcaaaatgccaccagtttctttgctaaagcatagcaagtgaccattactccagttctccatatcggaccacctcagcctcgactttattgtccatatcagtgtaagcattttggtcaaagacattcaacaagtctgtaggaaggtccaaactttcctgcatcttcttgtcttgtgagccctccaagtctccaggtaggagttccaaacttttccacattttcctgtcttctgagctctccaaactgttccaacctctgcctgttacccagttctaatgtcacttccacattttcgggtgtctttacagcagtgcctcactctctgcagtaccaatttaccgtatttgtctgttttcatgctgctaataaaggcataactgagactggataatttataaagaaaaagaggttcaatggacttacagttccacagggctggggagacctcacaatcatgggaaggtgaaggaggaacaaaggcatgtcttacatggcagcaggcaagagagcatgtgcaggggaactgccctttataaaaccatcagatcttgtgggacttattcactgtcatgagaacagcatgggagaaacctgtccccatgataccatcacctcccaccaggcccctcctccaacactgggaattacaatttgacatgagatttgggtgagaacaccaagccaaaccttatcagtattggccttggcaatgatcttttggataagacacaaaagcacaggcagcaaaagcaaaaataaacaaatgagagtgcatcagatttaaaagtttctgcacagcaaaagaaacatcggcaaaatgaaaaggcagcgtacagagtggaagaaaccatatatccaataagggattaatatccaaaatacataaggaactcatacaactcgatagcaagcaaacaaaataacccagtttagaaatgagcaaagcacttgaatagacatttttctaaagaagacatacagatatccaataggcatatgaaaacgtgctcaacgtcactaaccatcagaaaaatggaaatcaaaaccgcaatgagacatcacctcacacctgttaggatggccagtatgaaaaagacaaaagataagtcttggggagaatgtggagaaaaggaaacacttttatatattcaaggtgggaatgaacataatggaaaacagtttggaggttcctcaaaaattaaaaatagagctacaacccagcagtcccattctgggtatatatccaaaggaaatgaaatcattagctcaaagagatccctgcacctccatgtcaaaggcagctttattcacagtagccaagatgtagaaaatacgcaattgtccatttgacagatgaagggataaagaaattgtggtagatacatatagagtggaatattgttcagtctttacaaagaaggccgtcctgccgtttgaaacaatatggacgaacctggaggacattatgctaagtaaaatgagacagagaaagacaaatactgcgcgatctcacctgtggagtctgaaaaagtcaaacttctagaaaggaagagtacaatggtggttaccagaggctggtgggaggggttggaaagtgggaggtgctggtcaaaggttaggaacgttcagcttataagatgaatacattctggacacctcatgtacagcacgagaactgtagttaataatagtgtattgtgtacttgaaattggctaagagagtgcatcttaagtgtgtgcatgacaaaaaaaagggagttaactatatgagttgatggatatgttattagttaattgtggcagtcatttcacaatgtgtgtgcatatcaaaacatcacattgcggccaggcgtggtggcgcatgcctctaattcaagcactttgggaagctgagacagaagcattgcttgagcccaggagttcgagactagcctaggcaatgtagggagatcttgtctttacaaaaaatttaaaaattaaccaagtagggtggcatgtgcctgtggtcccagctacttgagaggctgaggtgggaggactgcttggacccaggaggtcaaggctgcagtgagctgtgattgcaccactgccctccagcctgggtgacaaagcaataccctgtcatacacacacacacacacacacacacacacacacacacacacatatcacagtgtactacctaaatatacacaaattctatttgtcaaggacacttcaataaatctgggggggaaaaagccaacagtatgatctgaagcagtattttccaaatttgttttgattggacctatagatagttttacataatgacttcccccacacatgtaaatagatatgcacgtaactgaaataaactgtttacaagggagtactcacattgaaaacctgtggcacactgtgcttcactccagcctcgtgctggccccggcaccctgatgtggcttcatggccggtcacaggctgcagcccccagtggaggagctccggtgctgggattcagatatctcatgaactcttaggcagcccttggagtaggcaagttcctcttcagatgtaacaggggttccggcaggttgtggcattgccggtggcattgccagcagggactcaggtgagcccgatgttcagctcggtaggtgcagtgctgttactgagggagcttgcatttgaattagggagatgtccatgctgggatgttgaaggactgcgtgtggtggggaggtcttgttggagcagttatccctgggcagctcagcctctgctagagtggcagaaaactttcacacggggctgcctcttcctgcctgtgtatggggcaggcagtgtgccttgatcatggggccctgcagcagagcctggagccttgtgatagagtgtccagtcaggcacctctggtcctttgaggtgaaacctgtttggcaatcagggctggttggatgggcaggtgtgtatcacccaattctgaatctttctagttgagcaacctaaggtgtaaagtaaggcggatgtgactattagaggtaaagccgggcgcatggtaggagctgcgtaagtgccggttgctcttacggcagggttgaagctgacttcctgttggaagtagcacttgagcctaagactgtgtctggatggtgagtccttaaagtaagacactgtatgttttcttgttttaatgatggaaaacggcaaatacaggccgagatgggaccaggcagagactacagggagacaagtttagccggtaaggcgggaatcaggcaggcggtgtctccagacaacctggaatgaaataaagtcatggccagatcttaggttagattgaagaaaaggcaacacaacagacattaaaaagtacaattcagtgagctttgttttgcatttagagtttgagaatgatagagaggtgtaactactctgaagcgtttgttcccgggatggttctcttggttggaagaggtgggtgccacagaggagcactttctgcttgatacatggggagtttaggggtcacatgggacatgtggtcggagctggggagtccactggacgaattggttctggctttgtccacaggcatgccgccatgccgttccagccctcagaatgggagtgagcagttttgggaggaggagcatagagagagcagagggcaggtgtccaccctgggggccacctacagggctgcaccttgacctggccccagcagccccttgtgaattgattcacaagcaaagcctcttttttagtggggcgctttggatactgagtagcaaaccctttccatggggttctagggtgaaccagtcttcactgacttgtacttgataaacagactttttctaagtttattttttatgcatttaagaacgcgcaaaacatcctcacatactcagagggggcgggatgaattcttccctcctccttcgtcagcacacagtttactaaaggcctcttaggtgcctgtcacagcctgagctggctgcttgcatattcccatgagtgggaggtgtgagctcgttgctcatacagttgagagtctggccaggaacccgggtgccggtggtgatcaatgtgttgcatgtgtggggggagtgcaggctgccacgggaaaggaccagggaaagtcccagcgacctttgtggatcagtcaactccgtgggaggaagtggtgtttcgaccaaggcctgagaatgtgcaggccaagtgataggaagtaggccacatctctcttcgttgtcatctgcaaactacgcattttattgtaagctatgtgcccttccagcttcagtcctggtcctgtgaagaataatccatcttgccagtctcaggcttgggcagtttgtaggaccctgaggctcctgggctcagattcttctgaattgtctttcttgaccctttccctctttgccttgacatttatctcttaacaagaaagacacacaaaaccgtgattggttagggaaccgcccgtcactactctgcaaacatgtagccaccacccatggctgtgtttccagaaagccacgaagcttctgtttgtgtagttggtttcctagactcctagcaagatgatatctcgatctggtctctctgaaagcgaatccacgatgtcatcatgcacccatctacccaggtgacaggttttcagtctggcagtcattcttcagggccctccacgcccaggcctccctcccacagactcagttggtaccgaggctcaagtgccatgtgaccttccttcatttccctgtgctctttgcagacttcatcacagccttacaatgttccctgtgatcttcagaacccaagaagcatttcttgaaagctttacctgtgagaactcgaagccagttattttctaaagcaaatcaatattacctcctgtagtctttaagcctttttttgcttctttttgaattatattttttcttcatagatctaaaaagttacttatacagccacttgaaactcattttattgcttcctctgataatatgactgagaaatatgagctttttcatagagaagtatatcccttggcccacgccaaggcagatataaaatcagtcgcatgcagagaaaatgagtggaatagcacaccacgatttcctgcaggaaatacagtcctctcccccacttattttattccacacctggagcaaaactaggctaagatgacccattttcttctagccaggggaagaaggcgttgcagtgatatgtctgcagggagagtgtcttttagagcacatgctgctcttaagtgcaggatgctgtgctgctggatgtgcatgtagaggcaaatgtttgattcggctttgaatctccaccactttggaattggtacccattcaaatgcatacataagtgtcttgtgaaacaaacaaaaaaaaaaccgcgaggggatttgggaaacaagttttcaggagcattgattatgaccatcagctccttaggacgtgaaatggatgcttcaaaatgtgtcccagagctgtctgtggccatcgtgtgcatgtgcacctgactctataaatgctctagagtgtatctcggccattgtgggcttgtgtcctcaactgactgtgaatgttctagagtgtacctcggccattgtgtgcatgtgttcccgactcactgtgaatgttctagagtgtatcttggccattgtgtgcgtgtgttccggtctcactgtgaatgctctagagtgtacctcggccattgtgtgcgtgtgttcccgactcactgtgagtgttctagagtgtacctcggccattgtgtgcatgtgttccgaactcactgtgaatgctctagagtgtacctcggccattgtgtgcgtgtgttcccgactcactgtgagtgttctagagtgtacctcggccattgtgtgcgtgtgttccagactcactgtgaatgctctagagtgtacctcggccattttgtgcgtgtgttcccgactcactgtgagtgttctagagtgtacctcggccattgtgtgcgtgtgttcccgactcactgtgaatgctctagagtgtacctcggccattgtgtgcgtgtgttcccgactcactgtgagtgttctagagtgtacctcggccattgtgtgcgtgtgttcccgactcactgtgagtgttctagagtgtacctcggccattgtgtgcgtgtgttcccgactcactgtgagtgttctagagtgtacctcggccattgtgtgcgtgtgttcccgactcactgtgagtgttctagagtgtacctcggccattgtgtgcgtgtgttccggactcactgtgaatgctctagagtgtacctcggccattgtgtgcgtgtgttcccgactcactgtgagtgttctagagtgtacgtcggccattgtgtgcatgtgttcctgactcactgtgagtgttctagagtgtaccatggtcatcgtgtgcatgtgcacctgactataaatgctgtaaaatgtaccatggccattgtgtgcatgtgtccttaactgactgtgaatgctctagagtgtacctcggccattgcgtacgtgtgttcccgactcaccgtgaatgctctagtgtgcacctcggccattgtgtgcgtgtgttccggactcaccgtgaatgttctagagtgtacctcggccattgtgtgcgtgtgttccggactcactgtgaatgttctagagtgtacctcggccattgtgtgcttgtgttcctgagtcactgtgaatgctctagagtgtaccatggtaatcgcgtgtgtgcacctgactataaatgctttaaaatgtacacatgcacaaatagccattgtgtgcatgtgtcctcaactcactgtgaatgctctagagtgtaccatggtcattgtgtgtgtgtgcacctgactctataaatgctctagaatgtaccacggccatcatgcacatgtgcacctgactcacttatttcagccattgtgagtgtatgtacctgactctataaatgctctagaatgtactacagccattgtgtgcacgtgcacttgactctataaatgctgtaaaatgtaccatggccattgtgtgcgtgtgtccccgactcactgtgaatgctctagtgtatacctcggccattgtgtgcatgtgttcctgactctataaatgctctagaatgttctatgaccattgtgtgtgtgcatacctgcctcattgtaaatgctctatggcagtggtccccaatattttcagcaacagggaccagtttcgtggaagacaatttttccatggaccagggtggctagttttgcgatgaaacttccacctcagatcatcaggcattagattctcataaggagtgtgcagcctagatccctctcatgcacagttcacaacagggttcccgctcctatgagaatctaatgcctcctgatttgacaggagacagagctcaggctgtaatgtcacttgcccactcctcacctcctgctgtgcggcctagttcctaacaggatatggattggtaccagtccacagtctgggggttgggaactcctgccctaagaatgtactggggccatcatgtgcatggactcactgtgaatgctctagagtgtaccagagccatgccgggtgtgcacctgactcactgtgaaagctctagagcataccagggccgtgttgggtgtgcacctgagtcactgtgaatgctctagagtataccagggttgtgttgggtgtgcacctgagtcactgtgaatgctctagaatataccagggtcatgttgagtgtgcacctgactcactgtgaatgctctagagtataccagagccatgcttggtgtgcacctgactcactgtgaatgctctagagcataccagggccgtgttgggtgtgcacctgactcactgtgaaagctctagagcatatcagggctgtattgggtgtgcacctgactcactgtgaaagctctagagcatatcagggccgtgttgagtgtgcacctgactcactcactgtgaaagctctagaacgtatcagggccatgttgggtgtgcacctgagtcactgtgaatgctctagattataccagggtcgtgttgagtgtgcacctgactcactgtgaatgctctagagtataccagggtcgtgttgagtgtgcacctgactcactgtgaatgctctagagtataccagggccatgctgggtgtgcacctgactcactgtgaaagctctagagtgtatcagggccgtgttgggtgtccacctgactcactgtgaatgctctagagtataccagggccatgctgggtgtgcacctgagtcactgtgaatgctctagagtataccagggccgtgttgggtgtgcacctgagtcactgtgaatgctctagagtataccagggtcgtgttgagtgtgcacctgactcactgtgaatgctctagagtataccagggccctgctgggtgtgcacctgactcactgtgaatgctctagagcgtatcggggccgtgttgggtgtgcacctgactcactgtgaaagctctagagcgtatcagggccatgttgggtgtgcacctgactcactgtgaaagctctagagtgtatcagggccgtgttgggtgtgcacctgggtcactgtgaacgctctagagtgtatcagggtcgtgttgagtgtgcacctgactcactgtgaaagctctagagcgtatcagggccgtgttgggtgtccacctgactcactgtgaatgctctagagtgtatcagggccatggtgggtgtgcacctgactcactgtgaaagctctagagtgtatcagggccgtgttgggtgtccacctgactcactgtgaaagctctagagtataccagggtcgtgttgagtgtgcacctgactcactgtgaatgctctagagtataccagggccctgctgggtgtgcacctgactcactgtgaatgctctagagcgtatcggggccgtgttgggtgtgcacctgactcactgtgaatgctctagagcgtatcagggccatgttgggtgtgcacctgactcactgtgaaagctctagagtgtatcagggccgtgttgggtgtgcacctgactcactgtgaaagctctagagtgtatcagggccgtgttgggtgtgcacctgggtcactgtgaacgctctagagcatatcagggtcgtgttgagtgtgcacctgactcactgtgaaagctctagagcgtatcagggccgtgttgggtgtccacctgactcactgtgaaagctctagagtgtatcggggccgtgttgggtgtgcacctgactcactgtgaatgctctagagtgtatcggggccatgctgggtgtgcacctgactcactgtgaatgctctagagtgtaccagggctgtgttgggtgtgcacctggctcagtgtgaacactctagagtgtaccagggccatgctgggtgtgccccggactcacgtgtatttagcatagcttatgaggggttggggagtgaaacctcctttactgcctgggagtggcaatgggggtttctcagctaaggtgacactcacactctgtggggtgtatcagggtagccagtggggcctctgaagattctcgggtggggcccaggaagtggtatatcagactggtaccatgcggggtcttgctggttgcagcctttttgtgatgcgtggtttctgaatatctgccatcagatttgacccgtggtactggtgtctgcctctctctgtggagcccattgcttcacagagggcggcttctccactaatctgcagtgggatgtgacgaacatctctttctacagtgcctttacgtgagtttaactcaatttttttaaaaaatttggattaaaatcttagctatgtgaaatatttagggttattctttttaatgtttttatttgttaattgacagattgcaattgtatggggttactttcttgagttttacgaagtacctatgtttattgaagttaaacatcaaacttaaaacatttagatgaaaacctttcaaaacatattttgatgtttactactttttagctagagcttactgcgggtaaaccccagtgattcttggcggtgactaagaacagctccttacacaaactgtaatacagtgttgctcttatggctttgtgagtacatgctagtgtttcaaattccatccaaaacgaactgccctaggttatggggtcttattaattcctgtatttttgcttccttctccccaatctattttgctctgaattaatcatcttttatagcttgctgaatcacctgcatttctgtttagagccaccccttttctctcctcatccacaattatgttctcttgtggatttagaaaccagatggtgacacaggttgggactgtgggcagttgaaagggcacacttgtcttccgaggaagggcttgaagatgctgctctttgaaacacagtgttcgaagcttcaaagttgttcagaggcctttaaaacatttcctcattctagagttgttgactattttccaaatccaaatgtactaacggttataactaaatttattttaaaatagtgttatttgttaatatgacatcttcactctgacctggaattcttcactctgacttagaattcatcaacaggtattaagtgtgtgccccaaaggttgccagtcattgtggggaacatagaagagttttaatagatggggtgtatgattcagaaacctttaatctgtttagagacactgtagtcaaatatttatggcaccaaaggaggtagccaagattagtgtttgtgcattattaaaattggtctgtgggaaagtgtggataacttataggctcttagctttgattcataattaggtagtctttgacatcagattggctagttctcatcctgtgatgtgtgagttagttgcgaagggaatctctgcctttctggagcttctactaaaaccccaagtgtcttggtgctgacgtacactgcgtcttgctggtaccatgctgagaagtcactgtcactgcattgttggcatagcccacacggatactccttgctccagccttttgcttgcttgttttttggtgggaagcacacgtgagttataagtgagatctgctggggagcttatgaatccatggaaatttactgcccgtcatatagaaaatgtcccgcatggggtaagtgcattactccaccagcacgagatctgtgggctgcccgttgcatccttctctccctgcattgcatttgttccttggaatttactatcaagctgtccgaactctacctatgtttacctgcagtaactgggctacggagagaagtgtgatcattttgctccaaacaagtatcttcaccattagagtcagccattgtcttaactggacaggagcagtgggttttggagcaggtttttcagcatcctagctttagagttttggtcttgtttactacatattatgtgtttattatgaatagataagatacaataaactcttggtctaatatagacgtgatgtgcctttgatcacagtactatgagctttctgtgtgttccttaaactataaatgagaaagagattgtggttttgaatgatgttaatgttgtgattacaagtaataatagctccatagacagtcttgagatgacggtgtaagggaggtatgcttgagggtgcccccaatcaatccatattgtgttctgtttaaaaagaaatagtgtagtaccttattgatgtctttaattactcacaagttaaagcacatggaatgaaattcctttctttataaataagcatttaagaatttcaccagagaaaacagacatccatatttgcgaccatgttgaaaaattcttggtccctttatggctttatcgcagaggtgagagcattttggtctttgttgagtaactgaatagcattgtatcatttaggatggctttggctgcagatgatgggaaacggtggctccaattggctcaaacattaggaaatggcttaacatcacccctgagcctggtgtggccggtggcagctcctctgccctgctctaagctctgtcctcccatctcgtccagtactttgccattatccttgagtgcctaaggagattgctacaaaggatgtgggcatcctgtgcaaatcatcttctcctctctgcctccataagactctccaccctccagcccccacaggcctccctcacgtctcattggccactgctggtcagtgtccattccttagttactgatgaagcccacgttggtgagtgtcttagcttgggctgccataaaaagcgccacacgctgggcggcgtcaacatgaaaatgtgttcctggggcgggaagtccaggatcaaggtgttggctgattcatttcctggtgagggctctcttactgatgtgtagacagctgccttctcactgtgtcctcacgtgatggagagagacaggaagcctgccctccaggtctcttcttataaaggcatgaatcccattgtgaggtccccaccctcatgacctcctctaaccctaatcacctcccaaaggctccatttcaagtacagacagtccctgacttatggcctctcaactttacaatggcatagaagcactatgcattcgtagaaattgcatttcgagtcccatacaaccattctacctttcactttcagtgtgatatccaatacgttacatgagatattcagcactttcttataaagtacgtcttgtgttagatgattttcccagctgtaggctgatgtgagtgttgtgagcctgtttaaggtaggttaggctggctctgacgatgagtgggttaggtgcatccactgcattttcagctcacggtattttaaacttacgacggatgtgaggacatagcccctgtgtacattgacgaacctctgcagcatcacaccaggtggggggctaggacttccacacatgaatctggggaggggggcacaattcagtccataacagtgagacaacaacagtgttgtcaggcattgccgggtgacagtgtaaaaaatactctagtgactacaggccggaaaagatttcctgcgtcatgaagaacatgtatcacagctcttacctaccagcctgggtatctcaaatgtttatgttaacatttggtacttctctttctcttagtgtcgtgtgggagccaatgggagatgggaagaaaatcatttccttggctgataaccatatcctgctgtgggatttacaggaaagctcgagccaggctgtggtaagtaaaagcaacaacacagcgtttgtttctgtatttttaaaccaaaccccgcatgttctcactcataggtgggaattgaacaatgagatcacttggacacagggtggggaacatcacacaccagggcctgtcgtggggttgggggagcgggagggatagcattaggagacatacctaatgtaaatgactagttaatgggtgcagcacaccaacacggcacatgtatacatatgtaacaaatctgcacattgtgcacatgtaccctagaacttaaagtgtaatgaaaaaaataaaaaaattaataaatgggacctttgggctaaattcagaatgtaattcttgattcacaacagtttagaattttgaccttagttaatgaacagactgaatcatcaatcaaagaactgactgatggggtctttcaggtgaaagccgttcagatgtcactcagggcttgtgagatatgacatggaacccagtggcttgcaaaacatctgcgttttgctgcactttgagcaaaggagggagtgggatgcccaggagtattttctaccgtttcaagcgtgctgtccttttgacgaatggattcttaaaatatatttgggtaaaatcatagttttaagtaggagcaattataaaattttaatttcatagtggtgcctagctcttgtaatgtatttgcatgagttatgaaaataacttttagcgctttctttgggttgagttttgcttttaaatatgcatcgtttgaatactttgtctctcacagagtaaatattaatatatatttttcatatttgatttcttaaaattttctcctttaaaatgtggtttttacatgcattcataatttcattgcgtttgtttatgttaaagtaaccactttagaaaagaggaagtggaagaactttgaactgatagcacttacaatgtcatttataccttgggggctgcgttgccggcacacagtcaaagcgattgcgcaagcatccattggatagatttctccagtgatggcctcatcttatatttatttgttcctaccatgtttttttagctcttctccctcatggtgccttagaatattaataagtcctttcctcagccctctaggctgacgaggtggtatgaataatgatgcatcattattaataagtggcacagaagtaagacttaaaaatattaagtttcctgttaaagctttaaacctctgaatggacaaaagggagtctcacagccttcaccgcggaattaagtgttgggcgttcacccagagcatcaatggtgtttaaggaagagaattattattttcatgacaaactttaaatataaggcatatcttcatatcttggagtagaatgcaagtttcacacaaacttttaagataaaacaggaaacgaatgacatttcatgcctgagattgacccccgtggaccacacctgcaggctggggatatatgtccataatctcccaccttccgggagatttggcagagtcctggtcatggtggaaggcgatgccttccttgtcccttccctccctgtgtttttgcggggcattcctacataactataaacctccaggaagaaggaggaaaatactttcctattaaaatgccaggctcacggtaggctttgggtgagacacttgggcagagggcccagctcccggtatagacacttgggcagagggctccattcctggtatagacacttgggcagagggcccagctcctggtgtgggaagagctgggtggagccttctgcacacctactgtgctcgctgtctcagggaggatgccggggagaaaggagaccccacacgttaggatgcggcaggtggagacctattctgtaatcaaactgtgaacacatcttcagagcctcggtcatctcaaatggatttcatggtagggtgattaatctgtaacttattttctgcagagatcaatttagttttctctcccccttttttatccactgtcagcagttctgtcaatattactttgtggccctccactgtggtatttaatacagaaacctcctatcgattcaagccatcttcacacccagcttctcaatgtcttcttattgtttgaggatattgccttctgtggtgaatctaatctcatgctcactgcatcattaccttttgcaattaaattggaaattccgtgccatttataatcattagcagaactcaggggaggcctggagtggaaggttccgtgggggccacagaccccgatgagggtagagggatggccgtcctgtgtctgtgtgtgctcattcatcttcgcctttcccagctttcactcgccacgaaataaatagcttctgtcaaggagccgacagtggcggagcgagaaggaagcttgcgtgaggattcgctccacctctgccttctgttcacgcaggagagcaggagctccttgaaggtggccatctagagagagccatctgcttggcgtgacacacacagtacctctttgaaggaagggagtatgcttcaggaacacagtgtttccattggaaagtttctaatcagaggtttaaaatgtaccacaggaggatcagataaacaaacataagctggggggcactcctagcgacagcagcatggtccttgcagccaacgccatgtccagcgtgcctgtaatgcaaatagcgtttgtgttttggggaccaagagagcagtgggcagaagccgagcttaatctcagagctcgtggggaggggctgggaactttgtgggcggtcggtgggttctatggctccttgccggcgcaccttggaaagcctgttctgttttcatctttcttgttctccaaactggaagagacgtggtacagaggaaagaggcttgtttcgttagtgttaaagtggagaacttcatgcgtggaacctgactgctggttccagcagcgaccctcctgttcactgcggcgtgcccatgggtggattcatttgcccttttatttctgatattttattaaaattttatttacttatttttaaactttcgttttaggttcagaggtgcatgtgcaggtttgcgacgtaggtaaattgcatgtcacaggggtttggtgtacagatgatttcatgagccaggtaataagcacagtaccgatggggagtttacagtcctgtctcctcccatcctccaccgaaactatgcatgttctcacttagtagtgggagctaggccaggggcagtggctcacgcctgtaatcccagcactttgggaggttgaggcgggtggatcaccttacatcaggagtttgaggccagcctggccaacgtggtgaaaccccgtctctactaaaaataaaaataaaaataaattagccaggcgtggtggcacgtgcctgtaatctcagctactcaggaggctagggcagggagacttgcttgaacctgggaggtggaggttgcagtgagccaagatcacgccactgcactccagcctggcgacagagcgagactccgtctcaaaaaaaaaaaaaaaaaaaaagaattgggaggtaaacagtgagaagacctggacatggagaatgggacagcagcaccgggacctcctcgactcgcctgcggatgttgctttcttgtctagaaaccaagcgtgctcatccctgcatgtggctgtgattgtcgtgggggtgttcagggacagctccttgtcccaatgtctgtccattgtcctctgtggcaacacagactaggacaggcctcactccccagcctctctgcagcctggtgtggccgtgggactgagttctggaaaaacagatgtgggtgggagatgcgttcaccctgaatgaggagttgttcccttcgtgttttaagtctctgctcctgaaacgtggaggtggctggcaatgctctttcctattctgtcacttttcttttcctctttttagtagggtctttttcagagcaaaagtttatctctttttttttttcttttcttttagaacagttttaagttcacggcaaaattgagtggatgatacagagatttcccacagcctccctcactctcagcatatcccctgctggcgtgggacctttgttatcactgattaacccatacgggcacatcaccgtcacccagagcccctcgttgacattagggctccctcttggtgctggatgttctgtgggtttggacaaatgtgtcctgacacctgtcctctaccgtggtgtcacacagaattgtttcacggccctaaaaatactctgtgccccaacgatgattctttcctcatgctctctctccaagcccctggcaagcccgatcttttcaccattgccattgttttgctttttccaggatgtcacagagttggatccatacagtatggatggtttttagattggtttctgtcccttagtaataagcagtcaaggtttctccaggtcttttcatggcttgaaagcacatttctttttatcactgagtaatgttccattgtctggaaggttctccatgtcgatgaagttcagtttgttggtctttccttttatgcattgtcccttgtcccagggctgagagctgagatgacttggatgctgaagatcgtctcctgctttctcctcagggggctgatcgctgtgcgtttgacagtgacgtcagggtccactttggttaagatgcacaaggtgcctgggcctccttccacgcaccctcgccatgcgggggacacggagtccgagcttccctgttgtagggggcagcgaggacatggttttttctgggctgcttgtctggagtacgtggtttctgtctagaggttttgtgtcctacttggctgcccctttttgaaaatgtggctttcagtgggctcttctggggccttatttggtggtgtttcctggcttccagcttcttcagctccaggtctggggtgaatgaggcagaaggagaccccagggagccccactgcgtgtctccttatgtgccgcgtgggcctgccctctctctccaactttcaaatcaccctctgttgtatgtgcagtgtccaggctttcgttgtgcttagtgagagaaacatggaacgggtgtacaccctgccttcccaccagcaggcgtcccggaaaagatggtgctggtcagccacctccactattgttcccgcttctggcgaccttgataatatgagagctcttcccttgtcctattagagggaagaatctgaacattctgaaggagcgtgcacggaccctgtgtgtgccatcattcccaggctggaggccttgtggggaagaggaacactggagtcggggaacagggatggccccagacacctgcacctgccacgggcctcactcacagaaggaggacctgccacgagcctcactcaaggaagaaggactcgccacgggcctcactcacagaaggacccgccacgagcctcacgcatggaagaaggacccgccgagtgtttcctgggggaattggggttgagttatgactgcaagaagtcagccatatgccaagcataccagaatgccatggccaaattcattcaacagacactcagtgagctcactttggagagggtaataaggacttttcccaacaaatggtcatttctcactatttttaagtagtccttttaatcagacacagacctcctcatcatataattgggccccctcccaactgacagatgagaagaggaaagctaacgacggaagcagaggaagtgtctgaaggtgacgtggtctgagtgccagatctggggctgtgggtcaggtctgatgccctataaatgagtcccacccgggcacagaggtgctcacggtggctcctgcctgcccagacctctcctgtcctccttcaggtctgtgaggttctcagataacttgctcttatttgagtatcttgaatgatcaataacattttgtcctatgagcatgaatttgatttttggaaaaagttaattggaacaaaatctggtaaataaaataggtcagcaagctttgcaaaagctgattagtggaaaacgggttaaaaccacatgaaaactgatttccttgtaagactcataaaaagacattctgaaatattttgagcagagactgcatcattaaaataaatgtcagctttatagccagggatttcagacaatggccagtgaaatttatgttttggatatttgttttgaaaaagccattatctttaagaaaatatgtagtcagtgatttactaagttgcatattttaatatcatagtataatttaccaagttgcatagttttaatatcataaaactacatgtatagtttgattttgtaaatattggagctcactagcattttcttattagtcttccactcagattttgaataaaagtcattaaaaaacaaaagtggctaggtgctggtatctagcaactgagcgtctttttcccaagctcttaaaagacttctttctggtaatacaaaacaaattatatatttttagaaccaggcgtctttaagaaagaggagctgctcaccctggggagcttcggcacaggctccccatcagcaccctgttctgagtgcctgccatgtccaagggccacctgaactgtgacatgctgctggagctttggtggccaacacagagcctctgccttttgtaatgtgccatgcggttatagggcctgcagtatctagatgatgcattcaatgtaagacttcaagttttgctggaatagctgggacaggcacgggtgagtgggaaggtgcacagagtacaggacgacctgagccgggggaggcccggaggcagtgagtcctcctgcagctggggcagcagtgcagcctgcaaaacgaggtccccttcctgccactccttaacagtgtgacctgagacatgttccttggcctgaccaagtgtccatttaacagtggaattacaggttacaggagagcagcgttcctcacagcaagctcttagtgtgtgcctgtcaggtagatggacggtgggtgggtggacgcgtggatgggtgtgtgggtacatggatgcggatggagcagctgtaatacatgatctccaacactgggccgtgggtgaaggttacccaataggagggtcaccaagaagaccctcgtgcagaggcaagacagaacttgaggtcccagaaagcagtctgtgtctccttcataattaaatgactttccccaaagccagcgaatgatcattacagttcagacatgagggatccggcgtgctttcatgacgcgctgctcccagtgttttctgccctcattattctttttaaaagatctttttccctctcccaaggattgcctctaattagacccacctctccaacagatcactaatgtctaattggggttgcagaaatatttcttatagtctatcttggtaaaaaaaaaataattctgatctgtactcatggtctttccaattttgagtgtgtaaaactgaggtcacatctgcattttggggtttaagacacagtttttctccagaaacagagcttagatttttgtgtagcaaaggaggagtgaaaagacccttttagttctattcttcctacaaatagaatccttttagaaataaactaaaaataagtttaaaacggcacatcctgtcacctaatggggacagctgatgccctgtgtacattttctgatacaggaaggctctactcttccaggaggccacaatgcagactctcatgcgggtcagctctgtgcatctcagacttcgtctccccaggggatggtacccttggtggtgtgtgggagcctgcagcccactgggggctctgtgtcccattcaagctgggtgtgcagagcctccctcagggctaagggcctacctgccgtgtgaccctggcaggacaacctccaccctttctctgtcccctggtgctaccagctcctgccatctggaaacaggagccctggcagccaggtatcccaccacaagagcctgggtgtcccgccaggagagcccaagtgtgccaccaggagagcccagccctcccaagatcctcttccttttctttttcttctgcatcctgaaggtggcactgggcctcagggactccagcagatttcatttccatcgcctccatcagaccatagtgctccagaaggcagcatcagtgttcgccccacataaagaccactcagagctcttctgagtgttccaaggtgctgttttttgagtcatagtaaagatgaagaaaaacatgtttaagatgcctgccacgtgctaggcactgtctggacatttgacctgtattatctcctttaatccttataaccctgcagcgtgggtcctttaatattgtcacgtgcgtgagttataggagctggagccaagcctcaaagagactaagtaacctgccaatgatggcttactcggaagcagagctggggttcaagctcggggcattcacgttcaaagctgggactggaattcccaaccagagatagggaagggaagtttccataggtgtcatcggcattctcaaatgggcactagaggtgccacagttaggttgtatttggctgcaggacacagggaatgacttaaacaatgaggaatctttattatctgctataacaagaagcttggaaataaagtgattcagtgtctccacagcatgaaggcctcagctgctttgcatctttccactctgccatatccacatgtgactgctttctgccttcatgactgcaaggcagctgcagcagttccagccatcacatgcagactcccacggttccagtgcagagaaagcagatttctctgcatctctgtttgtaaggaaggcctttgttagaggtgcctctgtccagttgtcagacataatggcaagtcatgtctaaactagtcattggcgagaacagtttcctcctgctcagctcagagcagtgtcagtccctgaggatgggatgggaacgggctcagggtgggatggtcatggccgttttgtaagccagcccctcccgcttgccgtgcagcccagggtgcacaacctgggacacgcctgcaccaggtgcttcatacgtcctgcgccctagacaccacagccttgctgtttcttcaccctgctgttctctgtccaaggtgagagggtggtgcgtgcttccctctgctggtcctccattttccttggtattggtcagcgtgcatgtagtagggtctgctgtgagtgcggcctgcaagtagtagggtctgctgggagcacagtcctacatgtagtagggtctgctgtgagcacggcctacacgtagtagggtctgctgggagtgcgcctgcatgtagtagggtctgctgtgagcgcagtgctgtgttctctgtagttttcctgtcctccaaatcaagccacccttgtcagctctgtggctcttgatggcaggaaatacagctttttgtctctcaaaatcttccgctgagactcttcttagatatgctccacatgaactgctaaagacgatgccaggcacgtcattttgctcgttaggaggtgtattcttttgttcacattctggcattagtaacatctcccttgaaagttttgtgggcgcctttaatcattccttttggaccaggaagcactgaatattcttctttaatgtcgaaaaacagattactgcatgcattgcaccctgtggagttcttgctgagtgctgtctccatgtccccaggaaaccaaaaattgtgattgattaaccttacaacttacactgcaccgtctgccctgagtagaccctcagaaattgatggtgaaatatctttcaggcttttattaaaatttaccttccaggcttctctgcacctgtgagtgtgaagttttcagggcctgggagtacaggcgttagcatgaccaatggagtggagtcaggtgacagatcctgtttctgcctccagctggctgtggccacaggcagctcacccactctccctgggttctagttttcccagctgtgcagtaaggggggccacagcccgcctctgagctgctgagatccatcagggtctccccttatctgggggcatctccctttcacctctggtcagtgcctcgtgttagtctgtctgttgctggaacagatgacctcaaagtgctcagcacggcccacgtgtgtgacctcagcttttgtgtggataacctggaatccaagcacacctcagctaggtcctctgcttgaagcctccctcgcatgaggctgtggtctcagggtcagtggggctgggcttgctgctggtcggatgtggctccttctgggctgctggactgagggcctggattcctccagctgttggccagaggccgccctcagctcctggccgtgtggccccacagtgtggagcttgcctcatcccagccagcaagatgaagcccagatctcttctcatctaatccgctgagggaccccgccctgcggtgctggtcagaggccagccgctctggggcagggactccataggccaccaagtccgagggccatcccagacgctgccgaccatgggcctcttctgcctccggcttccctggttttcagcctcctcatgtcacagcttcacctctgccagctctgctttttttatctaccctccagctggaggaggcgccccgactgcgggctctcctgtccgactcagtgctgtgctgtcccggcctcctggcctggtctgttttgtcgctgactaccggcacgtggttccccttcaatcaggtttatttacgttacctatctctctgccttggtgaggcttttgtttttgccaggaatggctcactcctgtgtttcactgatgtaggttctgttcagtctgtaacgcccatcgcagttcctaagcctcatgaaagctttccctagttactctaacctggatgagttctactttatttgaaatccctctcaacgtacgttattatcattcaccctggctctgtcacttgttagcttttaaaacattgtacaagtatttacttgttccaagcctcagttttctcatctgtcaaatggtgatattcacatctacatcatgtgacttgtgataatttcactaggaaatgagcataaatgctccgcacagggcctggcattgagtaactgataacgagttgtatttgttgagtgatttcttttcattgcacacatttacctcggcagccagacaccgagtgtgagaacaaaaaccacatctgctgtcatggcactcggcacggctgaggagcttgctcaataaatacttgttgatcagctgcaaggctaattggtagttggttgatggcttaattaattaacttactctttcaaaaatctagacgagtccttaagctgaaggttaggatgtgttttatcccgtgggttttggacgcaagcggtgctccattttgctgactgaacttctgcaaggagcacttacggagttagaagttgaagtgcaagagcttgggatggcagaatagctctgttgggggctcagcttgcattgctcggctcaagatttcgggccttccccttctggaatggccctgtggtgtttcgcacacacgagtcatcaagaacttgtccaggccactctgccgaatttgcattaccttctaaaggtgtgaccttgtgtttctgtcttctaaagagtttcataatgaaccaatatagttagtagaaagttaactggaacacagtatcgattagttagaaacaatatccagccttttcattatatctgctagttggtcttttttactgtattcattgtcatcaatggataatcattaacctgataagtaggtcttcagaaagctgaaatagtacctgtaaaaaatttcacttgacttttttctgtttacctaaagggaatactacaaaggtatttcttcattcatattgtccatgtggaagttaagacattgaacctaggccgggtgcggtggctcacgcctgtaatcccagcactttgggaggccgaggcggacggatcacaaggtcagaagatcgagaccatcctggctaacatggtgaaaccccgtctctactaaaaatacaaaaaattagccgggcgtggtggcgggcgcctgtagtcccagctactcgggaggctgaggcaggagaatggcgtgaaccccgggaattggagcttgcagtgagccgagatcgcgccactgcactccagcctgggtggcagagtgagactccgtctcaaaaaataaataaataataaaaaataaaataaaataaaaagacattgaacctaactaactgtaagttgccaaagttaaagccaaaaattagctcaccctgtgtttctgaaataatgtgtacactcgaatcattgctagtttttgacgtaatgttgctaccaattcttctctttaggaaactgtattccatcattgctgttggcaatgtttattttgacctactccccaactggcttttactaaaggttttcttgtggcttagcgtttagggtcgtgaattttccagctctgttttcttcctcggtagctttgcaagggggaccctctccttggctcctgtgtgtcaccctgcacactatatggttccttggagcttgctgtgggagccacgctctccctccctgcagtgcctgtgcccccgctctgtgtctgggtccatgctgagtgtatctgggagcccgcctcccgcaccagctggaaaagctgcacccttgccgcaaacgtaatgagaaggaagagatgctgtaaaatctgatggagtgaaataggaaggtgggaggcgcctctgattttatgcgcagagcactcccctcttttgttaacatcccccctccgccatggttgattgttcctggcgagtgcctggcccggctgtgccagtctacctccttctccaggaatttggggtgaggtctaagggttggctcatctttgggtgcctgatcagggggatgtcaggccctggtgttcccggcgcttttgcctcctgccctgtgcacatacgggagccaggccggagtgagagaaagagaaacggagcaggtgtggagagaggggcccagctcagggtgggagcacgtgcctggggctcggcagccccaaagcccaatgtggttcctacctcttggtcccgagacaccccaggctcctcaggttcaatttccctttgctagcgctagtttgagtccagcgtccgagctgctgcacatgctgccgtcaccatgcggagtgcccaggccctgccacctccctgcccatagcccagacctgcccagcctttctggttcggtcactctgtcctgctgacagctggcctggaccctggctgtcctcaccaagttcagtgcttggttccagccctgcccccactgttctgcctggtgctgtgtcggctgccttggtgagcctaccagactcaccgcggatgccttggcctggtgttcatgactcaagcttaatcctgccgtgctcacacgtgcttgtgcgttctggtgtctgcccctgcccccctccctgccccgcccctgtgtccacctttcagttctggacaggcttcccgaggccccacacgtggcggctgctcccacctcctcctctgtgtgctcctggcgttttcctgcttggtccgtgtgtgggatgcatgcctgccaactgtccccacacagcaggaatgcaattaacatttcctgcacggagcagaaatagcccttcagcttactgtggagagaggatcagtaagtcacccttggcacatacgacagtagagcggatagtttaccagggatatcgtaaaacaaaagccccgcgcttttcctaaggagacatcctttgacttcctgaaagtcacttggttgtggggatgaaagtggtgggccaggctgggcagggacctgggcacaggggagctgggccgggggcacacaggaggctctccataaacaaaagaaggagcccatcggcagccatccgcttggggctgggagggagcggacaggtccactcctcggcaacacccagcctgctggtgcccctgtccaagcgattcctagagagctcctctgactatcaccatggctattcttctcccagctcttagtgaggccccaggtgccacctcagccctaacccccttgtctgtacccagatgtggacacatactctccccatgcatgcccagatgcagacacacccgtcacctctacctagatgtggacacaccccccaatgcgtgcccagatgtggacacccccccatgtgtgcccagatgcagacacaccccccatgcctgcccagatgcagacacacccatgtcacctctgcccagatgcagacacaccccgtcacctctgcccagatgtggacacccccccatgcgtgcccagatgcagacacacccctgtcacctctgcccagatgtggacacacccctccccatgcgtgcccagatgcagacacacccatgtcacctctgcccagatgtggacacagccctgttacctctgtccagatgtggacacgccccccatagctgctcagatgcagacacaacctcctcgcttctgcccagatatggagtcatgggtaccctgtccccccagtgggtctcttgtgtccccaccttctcttgacctcttctcaccaccacaaggtgttgcaggaagtcagggactgcgaacagagggacctgctgaagccgtgacagaagaacataaattgtgaagatttcatggacatttatcacttccccaatcaatgctcttataatttcctatgcctgtctttactttaatctcttaatcccgtcatcttcgtaagctgaggatgtatgttgcctcaggaccctgtgatgattgcattaactgcacacattgttcgtaaagcatgtgtgtttgaacaatatgaaatctgggcaccttaagaacaggataacagcaattttcagggaacaagggacaatcgtaaagtctggctgcctgggagccgggtggaacagagccatatttctcttattaccaaaacggataagataaatatcgctgaattctttccccagtaaggaatattaataattaacagcccgggaaaagaatgcattcccggggcggggggggggccctctaaaatggccactctgggggtgtctgccatatgcagttgcagatgagggatgaaacacaccctggcctcctgcagtgcccccaggcttgctaggattaggaaattccagcctggcgaattctagtcagatgggttctctgctcttgaaccctgttaagatgtttatcaatgacaatgcaagcacagtgggacatggaagttcattagtggttgtagtttcgccctgaccttgtgatctcaccctgaccttctgccttgtgatcttctgttgcccttggagcatgtgatctctgtgacccacaccctattcgtacactccctcccctttgaaaattgctaataaaaacttgctggttttacggctcacggggcatcatggaacctgctgacatgtgatgtctcccccagacacccagctttaaaatttctctcttttgtactctttccctttatttctcagaccgaccgacacagggaaaatagaaaagaacctacgttgaattatcgggggtgggttcccccgataacaaggctctgcaaggatggtggctttcagtttccaaaaatgtttcctaagcatcagagcaggctttcggagtgggaggtgaagatgtggctcttcctgggcccgaggcctcttctccctgactgagcgcagtgtctgcgtctctcactgatgaccgcctttctcggcttctgaccaggactgttttgagttctcagtctctcgcacagcccatttgcataggactggggggacaccaggtcttgtagctcacgcctcccagtggccacctctgaaattgggaggcctcttgctgggagacaccaggagcatctgcagccagtgcgctctttccagaaagccctttacctgtggcttagacggtgccctatttctcactgggaactgcccgtctttctgttctgagtggtggtttccaggcagagcccctgcctgtctatgcagtgggcactcactctgtggggacctctgggacttgttcaccccgagcctgggtacccaacctgccctggccagcaaagcccctcggtaaatcttgtgagatgctgaataaactccagcaccagctcggtcattgggcctctcacggcctgtctagcagctcgtttggacctgccctcagcctggccaggcccgcctcaccagccacctgcctcaggctcctctcagagggctctgaagagcacagctggtttgaaagttaacggaattagtggtgggaactgtgtccctcaggaggacttgggggcaggtgtgacagaggaccctggggcagacctggatgcttcctgcctttaacagtcatcctgtgcattgaaattcaacccccaaattgaaataacgatgcagccaacatgctcagcctttgtgcatgaaatcctaggcgagcagagaaacgagctggggatcttcttgcaggctcacaactgggccccaccctcttttaggcagggggaggttttagccctaacaccagccccagagggccttgctgaggccttcatggtcagctcgctggcttggggtggtctgattaaatgccaggcgaaggccgtgtgggcctcgagacggagggagggaagagggcgtgcactggagacagcatctgaccaagtgaatgtgtttgtccctttgttattccggaaccgctcaggtggacctgacttgttttgtcgctttctttggggaaagccagatgtttgagttgttttgtattgttttccttcaagttcgagttgattatctctaatcacatacttgcaagcaaacgctctttaatagaggcctattaatatgctttctattttttgctgtgctcagttttatagatttccccaagtaaggttcatttttgccatttaaggaaaggaaacaaagacagagcttcctaattatcctcagtaattattttcaataatatccttgagtatacgatatcctctcgcgttttctgaacagacttcacattcttcttcttttcttcttcctttggaaaacatcgtgacactcccagctggccagctcagcgtccctggaagggaagggacaactgaagttcacctcaggacggtggagcccacatcataactgcacccaggtggccacagcgaacgacaccaccctccgtggctgggacacccggagcatgaggtcagtgagcccacccggcgcaggccccacttcctttcctccctcaccgagcagaaccgggatgatggtggagctgatggtgagccacatgcctttgggggcgcatggtttgtctttatctcgtttttgtaggaaatcataaatcttcatcttgtttcttcaccccaaattaagctagcacatccactgcaatggaaccggtgcacctcggtggctgtttaatgttccatattgatatctctgcattagcaggagtttattatgaaaactaggaattggggcttttgtaacactgagcgagatggggaccacagggtgcccgtgtctgatgagccgctgcaggctgacagctgcagtccccaggttaagtctctcctggggtcgtccttgaccatagctgtgccttctggagacacacctatagggcaatcatattttgtcatttaagtaattatacccaacagccagcagctctaatggaacaaataagagcgagttttccgttccagttgtgattttgataggcaaaggagtgatggtagcacgtctgttgctgtggcaacggaagcccacacaagcttttttaagatacagtttatcccctcagcacaccataatttatcaccgagctgaaaagacggatgtcatgcaataactcgtgttgattccagggtgggggcacaactttaggtttagttccaaggcccctctgaaaactcaggggctaataaagaatcacttgccacttcctcctttgtgcacgtccgtgcagagggcttgtttggtttcctaatcagaagctggaaaccacagactcagcccgtgatgaacgtcctgctgaaatccatttctccatgtcctgtggtcatcgtgtcctttgtctgcatggttttttgaaggatgtgaagaatttcagtatctgaaaacaagaaactcaaagactgacgttacagaccaaacaaataagcaaacaaaaagatgcccgtggctttgatgggtgacatctggcagtggcctcattttgcccgtgttgtgtctgtggtgaggacgtgccagcgcagcacagagggtcctggcgccttctcattgactgtcatttctccttttgcaagcagctttggtttgcatggagccaggatgcctttggtgcttttttaggtggtatgatgcttttgtgtgacagttactggtgatggagcatgcagtaacctttagttaatacatcgtgcacgtgcgactgtccatctagttccccgggaatttgccaagttttaaattttctacctttgcctgtttcccttgaaagatttaaaagtttaggtattatattttagggaagaaatattaagatattgcaaaggtgcaggatataaaaaccagaagatttaaaagtggtttagggccgggagttctaatgtgagagaaaaagatgaaaggaattgagttcctctactttggagagcagagaacaatgatggtcttcagataaaggaagcaaattacaaggcacagaagtttcccattgctcatcagccccattgaggcctgcggtgaggaaggtaaatgatgcaggagtgatttcagtcccgcccacggcagtgctggggaggccgtgcaggtaggagctgctgggcagcgccaggccatgggttctttgctctcctgggcgcagccttttgttccaagccactgtccagcctcactggatgacctgccctctgggattcatgacatcagggccataggcaggatattatgacttcagaccctgcgaggagcagccaaggaccataggatccagggcaaagtgagatgtgtgagtgcgtgtgtgcgtgtctgccctctcatgcatagatgtgtgcatgtgtgtgtacatacatgtgtgggcgtgcacacagatgcacgcgtgagtgtgagaacgcacgcactgtgaacagccgtgtgactcatttcaaacagtccccttctcccaccctggagcgagtgggttgcactggccaccagcagtgttggacctggagctggtgtggacagtggaatggcaagcccagctggcatggtccttcctgctttcatggccttccccactgctcctccctttctctctctctctctgtatatatctatagatagatagatagccggccccttcctgcttccatggccttccccactgcccccccctttctctctctctctgtatatatatagttctatatatagatagatattttgtgttgtatgtgtatgtatgtatatatatataaaatttcccaacactatattctacctcaactccctgtctttttcttttccttcttcactgtgtccttccagaaatgtgtcaggcatcctgtccaaatgtctggctcagtgtccccatggctgttgcagcccctctggcatgctttcattctcaagatgataccaagtcacatttttgacggctacaaagcaaaaattccttccacggctcgcccagagggtcacagatacgcttctggagagatgagcgtggtgcgaccacacagggttgctgggatggaggaggtggcgccagcctcttcctgcagggcaggaacgccgaggggatgagagcaccctgggccgggggattagacagggtcccgggaaaccagtgtgtgcccgcagcacgcagtggcttttcctaatccatttactattttcctttgctgttcttccttctccctcagccagatctactgcatagagaatgcccacggacagctggtgcgggaccttgactttaatcccaataagcagtactacttggccagctgcggagacgactgtaaggtgaagttctgggacacccgaaatgtcaccgaacccgtgaagaccctggaggagcactcccactggtagggccgctcctggctgcttcagggaggaggggattacgcaattgattttgctaattactttaccattgggaaagacacaaaccagcttagtttgtgctgctgtgaatcattcaatcaacccagttttatttttcctaaagaaacactaattccaaatctgaatgtttgtgatttataaacgtaggaaaagaagaaaaacattaaattctgttttctcttgaaacagtgctggttcaagtatacaaaaataaatgtgcacagatgttcacgcaacattatttgtaatgccagaaacctggaaaccacccaaatgtccatcactaggggactggttaagtaaattaggtgacatccgtgcagtggagatgatgcagctgtcgggagaatgtggagcatctctatgtggctgtgggaagatctctgaggtcactcattctccctaacatattatttgaatgtttttcatgtgctgggtactttttgctaagtaagtaaaaagatcaagttgtacaatggcatgtatagcatgaatccatttttatgcaaataaaacgtgtgtgcacacacgggtgtacacaagtgtgagtgacacaggtatgtggaggaaatgtctgaaagagtaagagccaaaatctcatcaggaatcctccccaagtcaaagaggggcattcactccctatggcctgcatctctgtattgtttgaattacttatctgaagctgtatgttaaaaccccggattggtagtgcacacttctgataaattcagtgacttgctggaatttcctgtggtctgagtggctgggcctccctgtgcccctggccatgctgggtgcacctcctagcgtcaagggcctggcactgtctgccacctgggccctggagcttgttttggcctcagcatgacgggaggcagaagctcccaggctctaggacccacgccagcaagaaagctgatcccagtagccaaaaccaaggacagcccttgtgccccgggaggccgccatgccctggtctcaggacccacagtcactgccaactgggaagatgccgtgagacttgtttgatattacaggatatcgctaatccacatgttgcttctgggacagtatttttttttttttttcgaattttagaaagcttgtctgaaatgttgcgtgataagccttctcctcctgtaggtttcagccaacatttagtcttccctgtctgtctcttgggacttaagagaaacctgcagtaaacccaacctcagcggaaaactgccttatgtcaggccctgtgactgggggccgattgcctggcagtgcctaacgtgagccccagcctagtggggccctcagagccggtgtgatccattgttggtgttgcctgcgggtgacagttcatttcagcagctgccttgccctttgcagggtgtggaacgtccgctacaaccactctcatgaccagctggtcctcacgggcagcagtgacagcagagtcatcctttccaacatggtgtccatctcgtcggagcccttcggccacttggtagacgacgatgacatcagtgaccaggaggaccaccgttctgaagagaagtaagggcacgcactgcagagtggctcacgctgtaccagagcctcctgtctgcacagccatctcccgagccaggctgtgtatgtagaaagtttccaggagtgcatttgggggacactctccttacccactgcagctgtggggactcacagttccaggggtgccgtcattagcagcccaggtgggaggcactgcaggtgcgttagggttaggtgcggttttaaaatagatctatttgtgtttgtattcttattgaatgccatctgtaagatttaaaagactcactggtcttcaaacttgagcatgaataataatagaacgaatatatcccaatcctcacagcactccctgtaagagacgcatcacagtcagtgtcttcactggcgtggatttgagcgtgttggggtcgggttgttggccatcagctcacgggccttccactggctggtagcagggcggagactccaggccaaccttcccagtctcaaacccgggtcctacttcacttctagatactctacaaaatgtggtcaaccatgatgtgggttttctagtcacaccatcatggttctggattttcccaaagctttttcctatgcaccttgatttctgatcctaggtgagatgggagatcgctaagggcagcctcttcatgcccgcctctggtcagcggtgcagtgccagggcccctgtgtccttgagcagtccacctttagaagtggcagccgcttcctggggggtgactagatgcaattcagttgcaaccgcagagattcttgccccaggttccagaggaaggaggttctggaataaaaccttgtgaagttggacagagcccttagatacgatggggtctgtcactctgttttgggatcctttgcactgttttttgtctgaattctccccctacccacctgagcttggtctaaaattcctctgtgagaagacctctttcttcagaccctctctgcagtggcgatgggaccatctgattgtctctgtcttcggaccctctctgcagtggggatgggcccatctgattgtctctgtcttcagaccctctctgcagtggcgatgggcccatctgattgtctctgtcttcggaccctctctgcagtggcgatgggcccatctgattgtctctgtcttcagaccctctctgcagtggcgatgggcccatctgattgtctctgtcttcagaccctctctgcagtggcgatgggcccatctgattgtctctgtctttggaccctttctgcagtggcgatgggcccatctgtttgtctcttgactctgttgcctttgttttgtttttgagacaaacaaaaacaaacaaaaaagtcacccaagctggtgtgcagtggcacgatcatggctcactgcagccttgacctcctgggctcaggtgatcctctcacctcagcctctcaagtagctgagacaacaggcccatggcaccatgtctggctaactttttgtagagacagagttttgccatgttgcccaagctggtctcaaactcctgagctcaagtgatctgcccacttcagcctcccaaagtgctaggattacaggcatgagccagactctgttgtttttctgttcaaaccttagaaactcggtctgccatagaatagtatttaagcacacgcacggtagcatctgcccagtggtctctcggtgcctgtgggcctggctccctttaccgtcctctctgccagtggcccagggagtctgcacttcctcaccatgtctgtccctgttaggggaggagcctgatgggcccgttggtcggaagactgctggcgttgtcttctgggcggcaatgtcatgggagcaagataggaagggaggaggtgatcggggctacgcagacttcttaggacatccctcagtcctgatgtcctgctgcattcaggaaaccatgattcctcctaaggatttgcacctggcatttgtcccacaacagcagttgaccactggcaggtccactttgtgggaagccagcttcccagagaccatgcgagttctggagggtccgtcttgctgggggggtgaagcattttcctacaaagaaatgcaaaagcagttagaatgcggtacacaaattatgtgggaatttttttgtgaaatgggaagtaaagtgccagagaagcctgtgtccaccggaaagtggccgctgtgagccgggcagggccccctccccatgcacgctgtgctgaggaagtggtgcttcttgtgtgaggatcccctggtcagggctcccagtgagggtaactcacagtcaagggaggcgaggtgggaaacaccctgggggaggccaggcaggtcacgcctctgctgctcccacagggccagggcgtcttcctcttggtgtcctgggggatcctcagcccagccccactcccatcctagcaaggctccttgtgccccagcctctgactcctacacagccaggagctggacccgctgcttcccagggtcctttctgctcaagcaataggggcgtttacatcctgtgttacccagacacggtgactacttcccccagtctttcccctgagctaaaggaagcccttggaagacctccaacaaaatatcaacccaggcacccgggggccaaggacagaagaaaccaagacaccatgtgccaatgtcgccgatttccataaaccttttgagaaatgcccactcctcacagtgacagtgagggtttctgggcttctgcagggaccaccccaccgtcctcggtgtgggctcctctaattcttcccatcccacagcggagaaagctgaggccccagtacctcccgtgtctcccgatgtcagcgctcgcgtcctccctgcccctctcctgcccgccccgccggagctgctgcgctcacgtctgcctctgttgcattgcaggagcaaggagcccctgcaggacaacgtgatcgccacctacgaggagcacgaggacagcgtctatgccgtggactggtcctcggctgacccgtggctgtttgcctccctgagctatgacgggaggctcgtgatcaacagggtgcccagggccctgaagtaccacatcctgctatgactcccgggcctgggttatccaggtcccattgagtggttttcctcttggcagattctcaaacagtcgcagctctttggaggtgactcgtgttccaggtggatccctctctgggagagccgctgttcccttcctgtagcagcagcatttatgaatggggtgaatggggctattgtcgacggcacagctaatgcccgaacccagcccctgtcggcagagacagagccccacattattatgtgaataacaatgttttctgttttaagggtgtcaggagtttcgctttttaaaaaaatgtctgttcctgcaatagtaactcttctttctcttgagagtaaaaaatgaaataaaataaatccacgctgcaca

SEQ ID NO: 17 - DNA, 62266 bp, Homo sapiens
agtttctggggattcgggcggagacgagattagtgatttggcggctccgactggcgcgggacaaacgccacggccagagtaccgggtagagagcggggacgccgacctgcgtgcgtcggtcctccaggccacgccagcgcccgagagggaccagggagactccggcccctgtcggccgccaagcccctccgcccctcacagcgcccaggtccgcggccgggccttgattttttggcggggaccgtcatggcgtcgcagccaaattcgtctgcgaagaagaaagaggagaaggggaagaacatccaggtggtggtgagatgcaggtagggagagggctgacaggattccgagcgctgcggcttcgctgctgggccccctactgcgcggtccagggagagggattttatttgcatttcctgagggtcccagtttcttggttctccgcgttctgttcaataaaaatgacacccggttgctgtgtgtatgtggtttttaggagaaaataacatgtttgatttgatcactgttccatactgaaaagtgcgttcttatgtttaaactatagtcaataaagatgtaggtgtcacttttatatgctacttcatgtagtttgtcagtttggaagtaagactgaatacctattttgcagatggttaagcacttacgttggtattattacctctaaaaagcaatcaatcactgttctctttattctagatgcaatattttctgcatccctactaaacaagtaaacatctctgtctttaaacattaaaaattaataaagtgagtttatgttttttaaaagatcaagacaagttaagctagtgtaaatttctgattgtgctgcagttttccctttcatctgcgtgtttgttcatagaccaaactaaacggatatttcgagataaagggatgtggaggggtgttcggccctcccctgactggtttccaaataacttcccaattttaaaataagctagaaactgctgcttagttagaattgatttattcaactttttagaggctctccacagtttactgagtatgtgtgttttgtgtgtccgtttttgtggctgttaacagttgctgttgcaacttttctgtaaaccccaaagtattctaaaattaaaaggttattttttagaaaaacttgtatcaacaaactttcttaggctattgtttactcagccctggtaacttgaattgtggatatcgaaggtgatgactaggtttctaaacaaggtgtcagagaggaaattgggtggcaatcttaagtctagccagtgacacttactagttgttgtactctggggcttctgttagtagttagttgtttgaagatttttatttaaaaatgcagtgcatataacaagtgcaaattttaaaattattttggttgtttaataaaaccaggcaatattaccttttccgtatgcatttatttaatttcttttttaatgttagttacaaaatatttcagacttacaaaaagttattaagaacaatgtaataaacatttgtatattcatcacccagattaagaaacaaaacaatcattgctggagccccccttttccctctccatcccttttcctccagccactgttaaccattatcttgaacttgatgtttatgatccgtatacatttcaagtcttagaagagatttactttatcaccaatgaatagaatagttctttgcttgtgtctaatatttacaataatttttgtgtaaagagattttttttttcagattagcctttttctttcaaatagccttcctggtgcgtctgtcattaagcattaagctttagtaaataggcaacttatgagttgcgaggtcctcaggggttggtaagccttttctgtaaagggcccagagaaataaatatttattttatttaaatactttaggctttgcagatcacatgtggtttatcagttttttttgagacggagtctcgctctcttaggccgtagtgcagtggtgcaatctcagctcactgcaacctccgcctcccggattcaagcaattttcccacttcagcctctcaggtagctgggattacaggcgcacaccgccatgcctggctaatttttgtatttttagtagagatggggtttcaccatgttggccaggctggtctcgaactcctgacctcagagaatccacccaccttggcctcccaaagtgctgggattataggcgtgagctactgtacccctttacatgtggtttctgtcacattattttctgatctttttttttttaagaacactttaaaactgtaaaaatcattcttaaatctgtcagggcaggggccaggtttgacccacaggttaaagtttacagatccctacataatgcgctactggttctctttcttatgtccctcctattccatcccctatttttttcccaatttaaaaagtcattttcaaacacacataatataaaatttaacatcttaaccacttttaagtgtacagttcagtgatattaaatacataatattctgcaacaattactaccatccatctccataactcttttcatcatgaaaaactgaaactctatacacattaaacaataactccccatttccctctcccatcaacccgacacctaccattcgactgtcttatgattttgactactctaagtacttcataaagtggagtcataatacagtatttatccttttgtgacttgctcattccacttaggcataatgtcctccaggttggaccatgttgtagcaaatgtcagggttttcttcctttttaaggctgcatagtatttattatatgtatataccacattttgcttgtcccttcatatgtcaatggatacttgagttacttctttttttgttgttgttgtttttgagaccgagtctcgctctgttgcccaggctggagtgcagtggcgcggtcttggctcacactgcaagctccatctcccgggttcacgccattctcctgcctcagcctcccaaggagctgggactacaggcgcctgccatctctcccggctaattttttgtatttttagtagagacggggtttcaccatattagccaggatggtctccatctcctgaccttgtgatctgcccgccttggcctccctaagagccgggattacaggcgtgagctacggagcccggccttgagttacttcttacttttagctattatgaataatgttgctatgaatatgggttttcaattcttttgggtatttacccagaattgtaattgctggatcatatgataattctattttaaagtttttgaggaaccgacaaactattttccacagtggctggaccattttacattcctaccaacagtgcataagggttccaatttctccacatcctcaccaacgtttattttctgtttcttttttttttttcaagtagccatccattgggtgtgaggtgctatctcattgtagttttgatttgtatttccctaatgattaatgatgttgagcatcttttcatgtgtttactggccattttgtgtatctttggagaaatgtctgtttaagtcctttgcccatttttaaattggtttgcttttttgttgttgagttttaggaattttctatatattttggatattttcagatacataaacggcaaaaattttttccccattactgtggtttgcctttttactcattgataccgtgtggtcttttcctttctttttctttttggaaccagtgcatggcctctttgttgattctgtgtttggccccagtgcagcctgttctgtgctatgtgtctgcagtgctgaaaccaggcctacccagcaccatacagaagtccaggctgtagataccaatgcatgggtcacatttgatacccaaatctgtgtgttcctggatctccaaaccaaagtttccagtatctgagaagttgttctttcttgattcacactcctgcatctttagacctttcttcagggtttcttctgctttggccctttgtgcagtgggtggcaatcttcacttctcctgatgccaaaggatctgacaatgtatttgactttggagaacacaggggtctggcctatgagctgctccaacaccttggctgctggggtcagtcatctccagtctcctccatacagatgttgagacagaaaatcgttctgtcacccaggctggagtgcagtggcacagtctcggctcactgtaacctctgcctgtcaggttcaagcaattcttatgcttcagcctcccaagtatctgggattacaggtgtgcaccaccatgcctggctaattttttgtatttttagtagagatggggtttcgccttgttggccaggctggtcttgaactactggcctcaagtgatccacccattttggcctcccaaagtgctgggattatgagtgtgagccctcatctggccagagttctcttttttttaccttgatcttgcactatgatggagaaaaggaagataaagtctttttttttcccttgggtttgtttgtttgtttgtttgtttgttttttgagacggaattttgctctcgttgcctaggctggagtgcattggtacgatcttggcttactgcaacctccgcctcctgggttcaagccattttcctgcctcagcctctagagtagctgggattacaggcatgcgccaccacgcctggctaattttgtatttttagtagagatggggtttcaccatgttggtcaggctggtcttgatctcctgatctcaggtgatccgtccaccctggcctcccaaagtactgggattacaggcgtgagcccgtgcctgggctattttttttttctcccctttaaatatagtatcttgctttattgcccagacttgttgtgaactcctggactcaaatagtcctcctacctcagccttccaggtagctgggatcacagggatgctgtcttttgatacacaaacattttaaatttttatgaagtccagtttgtctttttgtttttgttccctgtatctttggtgttatatccaagaaatcattgccaaatccattgttgtgaagcttttgccttatgttttcttctaagagttttatagctttaggtcttacatacatttttgatccattttgagttaatatttgtatattgtgttagataagggtccaacctcattcttttgcatatggatatttagtttcccagcaccatttggtgaaaagcttgtctttttctgattgaatggtcttggcaaccttattaaaaatcatttgctcatatgtaagagggcttatttctaagtgctgttatgttccattggtctataagtctgtctttatgtcagtaccacatggttttgattattgcagctttgtagtaagttttgaaatcaggaagtgtgagtcctccagctttgttctttttcaagattgttttggctatctggactcccttgggattccatatgaatttgaggatgaatttttctatttttgtaaaacacgtcattgggattttaatagggattacattgaatctatagatcactttgggtagtattggcatcttaacaatattaagtctttcagttcatgaacaagggatgtgtttccatttatttatgccccttaatttctgccagcagtttttttttgtttgtttttgttttgagatggagtttcgctcttgttgtccaggctggagtgcagtggcacaatcttagctcattgcaacctccacctcccgagttcaagtgattctcctgcctcagcctcctgagtagctgggattacaggtatgtggcaccacgaccagctaatttttgtatttttactagagacaaagtttcaccatgttggtcaggctggtcacgaactcttgacctcaggtgatccacccaccttggcctcccaaagtgctgggattataggcgtgagccactgcgcctggcctcagcagtgttttatagttttcattttataagtctttcacctccttggttaaattaattactaatattttattctttttggtgctattttaaattgagttgtttttgtaatttcctttttagattgttcattcttagtgtataaaaatgtaactggaggctggacgcagtggctctcacctgttatcccagcactttgggaggcaaggtgggcctcccaactcctgatcacgagatcaggagttcaaggccagcctggccaacatagtgaaaccctgtctctactaaaaatacaaaaattagccatgcatcgtggcgcgtgcctgtagtcccagctacttaggaggctgaggcaggagaatcgcttgaacctggaaggtggaggttgtggtgagccaagatcgtgccactgtactccagcctgggcaacagagtgagactctgtctcaaaaaaaaaaaaaaagaaaaaagaaacgtcgctggattttgcttgttgactttctatccagctactttgctgaattcacttattagttctaacagtttttttttgtgtgtgtgtaattttagagttttcttttctttttttttttttgagatggagtctcgctttgttgccaggctggagtgcagtggcgcgatctcggctcactgcaacctctacctcccaggttcaagcaattctcctgcctcagcctcccgagtagctgggactacaggcacacgctacgacgcccagctaatttttgtatttttagtagagacggggtttcaccatgttggccaggatggtctcgatctcttgacctcgtgatccacctgcctcagcctcccaaagttctgggattacagccgtgagccactgtgcctggcttttttttttttttaattaactattgaacttctgtttattattattattattatttatttatttattattttttgagatgaaatctcggtctgttgcccaggcgggagtgcagtggtgtgatctcggctcactgcaacctccgcctcccgggttcaagcaattctgtgcctcagcctccggagtagctgggattataggcgctcgccaccatgcccggccaatttttgtatttttagtagagatagggtttcatcatgttggtcaggctggtcttgaactcctgacctcgtgatccgcccgcttcggcctcccaaagtgttgggattacaggcgtgagccactgcacttggccttatttttattatttttttcatcaacttttaagttctggggtacatgtgcatgatgtgcaggtttatcacataggtaaacctgtgccatcacagtttgctgcacagatcaacccatcacctagctattaagcccagcatccactagctattcttcttgatgctctagctccttttgccccactgaattttagggttttctttcttttctatttttttttcttttgagacagactctcgctctgtcaccaggctggagtgcagtggcacaatcttggctcattgcaacctctgcctcctgggttcaagcgattctcctgcctcagcctcccgagtagctgggactacaggcatgcgcccatgcctagctaagtttttgtagttttagtagagacagggtttcactatgttggcaaggctggtctcaaactcctgacctcaagtccccttggggttcctgaagtactgggattataggtgtgagccaccacgcccggccagattttctatataaaagatcatataatctgcagacagataattttactttttccttttctttctttttttctttttttgagatggagtctcgctctgtcgcccaggctggagcgcggtggcgccatctctgcttactgttacctctgcctcctgggttcaagcagttctctgcctcagcctcccaagtagctgggattacatgcacatgccaccacgcccagctaatttttgtatttttagtagagatgggagttcatcatcttggctaggctggtcttgaactcctgacctcgtgatccatccgccttggcctcccaaagtgctgggattacaggcatgagccaccgctcttggccctcaaccttttccttttcaatttggatgccttttatttttatttttcttccttttttttttgagatggagtctcgctctgttgcccaggctggaatgcagtggtgcaatctctgctcactgcaacctacgcctcctgggttcaaacgattctcctgcctcagccttccgagtagcttgtactacaggcatgtgccaccataaacagctaattttttttttttctcgtatttttagtagagacggggtttcgccgttttagccaggctggtctcgatctcctgacctcgcgatccgcctgcctcagccttccaaagtgctgggattacaggcgtgagccaccatgcccggcccttgtttttctttcttgcctaattactctagctagaacttacagtattatgtcgaatggaagtggcaaaagtgggcattgggcatccttgtcttgctcctgttcttttatttgttagtttgtttgagatcctcctgcctcagtttcctgagtagctgggactatagacacactactacacccagctaattaaaaaaataattttttttttttttttagagatggggtctcgctatgtttcccatgctgatcctgaactcctggcttcgggtgatcctctactcttaccctcccatagtgctgtgattacaggcatgaaccactgtgctggccctgttcttgtttttagaggaacattcttcagtctttgaccatcaattatgtttgctgtgggtttttcatatgttgcttttattttgttgaggtagtttcactctattcctagtttgttgagcatttttatgactaatgggttttgaattttgtcacatgcttttcctgcatcgattgacatgattctgtggtttccttcattctgttaatgtggtatattacattgatcaatttttacatgttggaccatccctgtattccaggaataaatcccacttggtcatggtgtataatccttgtgctgctcagttcaatgtgttggtattttgttgaggatttttttttatcagtgttcataagggatagtgatctgtagttttcttgtagttgcctttgtctggctttggtatcagggtaatgcttgcctcacaaaatgagttgggaagtgttctctcctttgccagattttttctgggaaaagattgagaagaactggtattagatcttcttgaaatgttttatagaattcacctatgaaactatcagatctagggcttttctttgtcaggagatttttggttagtgagtccatctctttactggttatagctccattcagaatttccatttctttgtgatttagtctttgtaagtattgtgtttctaggaatttgttcagctgggttatccgatttgttggcatacaattgttgaaaatactctttcaacaataagagagaagacacaaataactagttcttttgtttccagttccttaagttgtaaagttagggtgttgatatgagatctttcttgctttttaatgtaagcattcatagctataaatttcccccttagcactgcttttgctgtgtcccgtaagttttggtatgttgtattttcattttcattaatctctaaaattttctaattttccttgtgatgtctttgaaccctggttacttaaacacacacacacacacacgtgtgtgtgtgtgtgtgtgtgtgtgtgtgtggttttttgtttgttttgagactgagtttcgctcttgttgcccaggctggggtgcaatggcgcgatctcggctcactgcaacctctgcctcccggttcaagcgattctcctgtctcagcctccagagtagctgggattacaggcgcctgccaccacgcctggctaatttcacacacacatttaaaaaatacatctacctgcttttacttcagaatctttgcaatttctgttctctctgcctgaaaattttttccaccaaaatatctacagggcctggctcccttgctttttaggttctgcttaaatatcacctgcgtagaagcattccctaactaccctaaaatagcaaccaactatcttccaccctcaacacttcctatcccccttaaactgctttcttttcttttctttttttttttttttttttgagacagagtctcgctctgttgcccaggcctggagtgcagtggcgcattcttggctcaccgcaacctccacttcagcctcccaagtagctgggactgtaggtggctgccaccatgcctggctaatttttttttttttgagatggagtctcactctttcacccaggctggagtgtagtggcacagtctcggctcactgcagcctccatctcccaggttcaagtgatttctggctaatttttgtatttttagtagagatgaggtttcaccatattggccagggctagtttcgaacttctgacctcaagtgatctgcccaccttggcctcccaaagtgctaggattacaggtgtgagccactgtgcctggcctaatttttgtatttttaatagtgatgggtttttactatgttggccaggctgatctcaaactcctgacctcaagtgattcacccacctcagcttcccaaagtgctgagattacaggcgtgagccactgtgcctggcctgctttattttcatttctaatttatcagcatctaatatatttattcattttatagtcatctcttccttcaactaagttaaaagctccctgagcacaggattttggtgtttttttctttcctttaactttgtattgttcattgctgtatctccagtgtctagaaaattacctatcacatagtaagtacttgatgaatatttgtggaatgagttaatttagcacttctccacaggataggacttaggtttttttaatcctcaatctcccttccctcaccattttgattgtttgaatttttatataactatggtgaagccaacaaattgatggatttgttagtgtgagcagccgaaactttgcaatttctaataagttagagaagtctgggtaggaaactaatgacttggcagtactctttcttagagtacacatagtccctaaagcttctctgagaattttgataactttgaggaatgtgtgatctgtatgaatttcctatcacttagtcctgacaatgtgaatggtattcatttggtaacttaattttatacgtccaggcaagatactagtttaggggatgccaaaaataatagactaattggaaaagctttagccacatgagagcaattcactccacttgatgctcttggcctacctcagtataagttggttctaccttagttttgttgaagttttaataatactgtacattcatgttggttatatgcattgtgtaagttttagtatagttggcaaatgaaagcattaccagatactacctgggagttaagtttcctaggatcacagatttggtcttctgatcacttggaagtatacttagagtgggctgtgccaggggaagttgaggtatccttcttaaataagtagcaacttggtttatctagtgataagggggaaataatttcctgtttggcactttctccaaaatatatgatactcaatgggaaaaatgaactcaggtcaagattatgtctctccctttggcccagacatgtattgagtatataattgtcttattgatgctactctgtggactgtgatattagttttcccataattcctcttaggatgacatttattaggcaatgtagtttaacagatatttaagaacctactgtgtgctaagcatggtagttgttgctggggaaacagtaaactagacagtatttctttctgtagtgatctgaggtttagtgggtaacacattaaaaaaaaaagataagagaggtgatgtttagaaaaggtgtataaagggtgctgtaggaatatatagcagacatttaatgtggtcttggttggagcaggtgggggaggcacataggatagaaaggacttcctgaggaaataatcatttcaactaaatacctactcaggcatttccgtagaatgaggactcttgatccagtcggcagtgtagaccttctgtgtctattcactcatttaaaaatggggctaataatattaccaacctcacagtgttgtgtggacaaactgagtgagcacaatgcaaagcacttgaaacaataagtacctggcacatagtaagtactcaacttattagtcattatttttatgtactttttattttgtgccaggtatctactggcagattagtattttgaacacaaatttgacatgtttttttctactacatcataacctaatttgatcggatttttttttttttttttttttgagacggagtttcgctcttgttgcccaggctggagtgcaatggcgcgatcttggctcaccgcaacctccacctcccaggttcaagcaattctcctgcctcagcctcccgagtagcagggattacaggcatgcaccaccatgcccagctacttttgtatttttaatagagacagagtttctgcatgttggtcaggctggtctcgaactcccgacctcaggtgatccgcctgcctcggcctcccaaagtgctgggattacaggcgtgagccactgcgcccagccttgatcagattttaagaataggagaaatggaattctgaaaaataagtttggcatttttacaagttaaaacctgttagtggctgggcacagtgtctcacttctgtaatactagcaccttgggaagctgaggtgggataatcacttgagcccggaagtttgagaccagcctgtgcaacacagcaagaccccatctctaccatcaaaacaaaacaaatctattcgtatctgctctaagaagctgccagaattgtaatgtcttaacatatctttgaacatttaaaaaattatatttgtgaaacttgagacacttataattttactgtctgctttagcaatatcacttagtcctgatttaatctccatcaccaacaatgtggtcaaaatttcgcatttttcttgacaaatgtagttagtgaaaatgtcattgataacctgagaactaagagctcttgaatgactttgtgtatttctttttatagaccatttaatttggcagagcggaaagctagcgcccattcaatagtagaatgtgatcctgtacgaaaagaagttagtgtacgaactggaggattggctgacaagagctcaaggaaaacatacacttttgatatggtaacatatggtgcaatttctttattatccactaatgtaaaataattttaatatacatattttacctggaaaatggtgtatacttagaaatttcagttgtctctgaattgtcagatggcttctagtgggctgaattatgaattagttaacatacgaaaaacaaaattattaaaatgagtaattttgaggttgatttttttttttttaatttttttcgttaggtgtttggagcatctactaaacagattgatgtttaccgaagtgttgtttgtccaattctggatgaagttattatgggctataattgcactatctttgcgtaagtaaaagggtgttttttctgatttatgaaaaagcttaaatgcttgtgttttttgttgttgtttgtttgttttttgagacggagtttcactcttgttgcccaggctggagtgcaatggcgcgatctcggctcactgcagcctctgcctcctgggttcaagcaattctcctgtttcagcctcccaagtagctgggattacagctgcctgccaccatgcccgctaatttttgtatttttagtagagacgtggtttcactgtgttggccaggctggtctcgaactccggacctcaggtgatccgcccacctcggcctcccaaagtgttgggattataggcttgagccactgtgcctggcttgttttttgtttttctagtctatcactaagagtcatatgggtgcatgtttctttttgatttaacacttgttaatctttacaggtatggccaaactggcactggaaaaacttttacaatggaaggtgaaaggtcacctaatgaagagtatacctgggaagaggtatttattgtttataacatacttttatctctaatgtgactgaaatttaactgtataaaacttgtttgagggcctctgtcttggaatagagatcagagtacctatgtcaaaatgaacttaggataaaccactactacagtaaaattaaagtgcatggtatgactcctgtttaagaaacagcctcaatggaagaggaaggaccaatatatatggcacagttatatgataaaagaggagtctatttatgacagaatggttggagcagaatattgtagaaaagttggaatatgagtgaagcttgaaggcagggagggctttgtattgaaggaatgggtctcagaaagttagcatggccaggggaagtatagtactttattcatgatgatcctaagtgttcaagaaattaagatgaatgtattgtttaatattgcagaaagcatatactatgttttacaaagatttccatgaatttaagtgagtttaataactaagagagagaaccaatactggaagaaagttgaaagaagaccaagacaagttgaactagagctgaagtgttaaaacttttaaaaaaaagtttagttttaaatttagtaatgtgtttaaatttaaatgagtttaataactagttaattggtcgggcacggtggctcatgcctgtaatcctagcactttgggaggctgaggcgggcagatcacctgaggtcagcagttcgagaccagcctggccaacatggtgaaacccggtctctactaaaaatacaaaaattagctgggtgtggtggtgcatacgtgtaatcccagctacctgagaacgagactctgtctcaaaaaaaaacaaaaaaacaaaaaaccaaaaaactagttaatttaaaaaaaaaaagaattttttttaatttttttttttttttttaaattttaaagtgatggggtcccactgtgttccccaggccagtcttgaactcttgggcttcaggagtcctcccacttcagcctcctgagtagctgggattagaggcacatactaccttgcccagctaattttccaaattattgacagttgggtagaacctttcttctagtggttacataattgagtcattaacttactttacatatatagataataaagttatgaaattgttaccataggagatatggaataggcttaaagcatagtttcgctgggcagaattattgaacttggcgttttttttttgagacggagtctcgctctgtcgcccaggctggagtacagtggctcgatcttggctcactgcaacctccacctcccgggttcaagtgattctcctgcctcagcctcctgagtagctgggactacaggtacataccaccaagtccggctaatttttgtatttttagtagagatggggtttcaccgtgttggccgggatggtcttgatctcctgaccttgtgatccacctgccttgacctcccaaagtgctgggattataggcgtgagccaccgtgcctggccgaacttggctttttaagtagataggttccattggtttctatgtaatgctcagggatgaagatggctaagaagtgtgacaggtttatggagggtgtgaagactactgtagaacagactgttgtaaatgacttctctaacattaggttagttgtttctttttttgttttgttttaacttgctttgccatacttatgtttaaatatattataaaggaggcccatgtattttaactgccacagtaaatggcattcttcctttatattagtccttattataatttcaggatcccttggctggtataattccacgtacccttcatcaaatttttgagaaacttactgataatggtactgaattttcagtcaaagtgtctctgttggagatctataatgaagagctttttgatcttcttaatccatcatctgatgtttctgagagactacagatgtttgatgatccccgtaacaaggtaattcagtctttgagaatgaaatgtctctgaattttaatgtgtgaggctttgagaagtcagagagagagagagagagagagagagagagagagagagtgtgtgtgtgtgtgtgtgtgtgtgtgtgtgtgtgtgtgttttaaccaatctaatggatgttcttttggtattttggtcagagaggagtgataattaaaggtttagaagaaattacagtacacaacaaggatgaagtctatcaaattttagaaaagggggcagcaaaaaggacaactgcagctactctgatgaatgcatactctaggtaagaaagccatagtctcttccctagccccattttcttttaagaagaattaggaacttggagaaagtcaaattggggtgggtcagggtatgtgggtcacgtacctagagtttgtgttataaggaggggtcattggtaattggcttgagatttatatggaaggaaccaatattggaagaatgttgaaaggagaacaaagataagttgaaccatagctgaagtattaaacttttttttcttttttgagacgaattttcgctcttgttacccaggctggagtgcagtggcgcgatcttgactcactgcaacctctgcccaccgggttgaagcaattctcctgcctcagcctcttgagtagctgggattacaggtgtctgccactacgcccagctaatttttgtatttttggtagagatgtggtttcaccatgttggccaggctggtctcgaactcctgacctcaggtgaaccacctgccttggcctcccaaagtgctgagattacacgtgtgagccacggcgcccggcctaaacttttttaaagtagaagaatccttttattctagtaacatgatatatggaagcccaggataaaatgtggctgctatagttgattttggaatgggacgctctgaggcttacctccttagccttatgaaggggtccctgaggcacttttgtggagccccctactgatattagaatatagtttgaaaacccttgcattgaataaggattagaagttaggtcttttaaaatggctttattttagtgtgggagacagatggtcactaacactggctttcatggggtgaaagggatgatttttttcgctctaaatatcttttaccgaaatataaaattcctttttaaaaaattgtttattttcctctcttaccactctattcattgagatataaaatccctgtcataaatttacgtaagttagaaactccttttttcttgtaaagacccgtacaggacaaattccaaattctacagatatagtttactaaaacagaagtggtttttttgtgtgtgtgtgtggtctttaaacctcagaatgtaatagaaaaagcaatggattgcaattagatatttgcgtgtagtctcagtttcgcggttaattcagtatgtgactttttgtaaataagtgaatttatctgcttatcagtttctctgagctacaaaattattgttaggattagaagtcttatttcttttctggcttgtagttgaaaatttctataaaatgccataacaattacagttgcaactctaaaaaagtttgcatttaaagaaagaagaaaaatataacataaaagtgattaagatcatggaattttggatgatttcaaaattttaattaaattttcacttaatggctttccaataaaatggaaattttattctgtggttgattataacttaatttcatgtagaattttgagaactgaactaaagactaggtaaaatttctttaggtacatttcactaaagtataaaatttctatttttccttttttcttgtatgtagacttgtataaaggtcactttttatgaaggtatgtgacaaagaggagaagctaattaattcagttttcccaaattagagctaacttcaatgcttatttgtattaattgcctaatctggattaggaatgggtagataatggtagaaaaacatgagatgaatagtattattattattattattatttttgagacagagcctctctctgtcccccaggctggagtgaagtgatgcgatctcggctcactgcaagctctgcctcccgggttcacgccattctcctgcctcagcctcctgagtagctgggactacaggtgcccaccaccacgcctggctaattttttgtatttttagtagagacggggtttcactgtgttagccaggttggtctcgatctcctgacctcgtgatccgtccacctcggcttcccaaagtgattacaggcgtgaggcaccatgcccggtggagatgaatattataattcagatctatagtttacatttatgtttttccttaggtcttcctccttttctgtaattttaaataatttaaataattttataaaaatgatacttggctgggcgcgatggctgacgcttgtaatcccagcactttcggaggccaaggtgggtggatcacttgaggtccggagttcaagaccagcctggccaacgtggtgaaaccccgtctctactaaaaatacaaaaattagcttggtgtggtggcgtgtgcctgtaatcccagatactcggtaggctgaggcaggagaactgcttgaacccaggaggcagaagtttcagtgagctgagatcatgccattgcactctagcctgggcaataagtctcaaataaataaataattaaaaaagatacttaattttttttttaagtaacatgaaagtacaaagaagaaaattgaaacttaccagattctctgtcaattgtcagtgatattaacaaacataataatgttcaccaaatgccattggatacagaaagaatgtctttggtcatctgtataattttttttccccctaagataaaaagcacagtatttgttttgttttttgtttttttgtttgcttgtttgtttttttgtgatttttttttttgagacagcgtctcactttgtcacccaggctggagtgcagtaactcaatcatggcttactgcagccttgacctcctgggctaaagtgatcctcccacctgagcctccagggtagctggaactgtaggagcgtgccaccacgcccagctaatttttaaatttttttgtagagatgatggtcccactatgttgcccaggctggtttcgaactcctgagttaaagtgaccctcctaccttggcctcccaaagtgttgggattacaggcatgagctaccacccctggcctgaatatcagtatttagcataaggtagacttttgaacattttataatctagcagtgattatcttgtagtgttttagtaatcatgctgtttactatttctgctgttaggggataggagtcatctatttctgatgacagtctcaaagcagagaagtgtacttgtgcatgtacacaacagctgacatggatgggaaggtggaagagtaaactaatgccttacctggtaccatttgaatttatggtaatgacatatttcaaatggttcttatgaatagaagatgattacaagccatctcttcttgacataccaggcaactgtttcgaccccacccacatccagctttcagaggtgcctcaggattctaagtcttttagagagcttcttattgatgcctcttttgcaggcagtagatatgagaaaacaaaatcctaatcactgttctatctatctcctatcttccaaaatattcttgatatctcctgtctgatgttatctttctctactcatgtggatttagatcttctttcctgttttcagtatttcagaagcagcaaatgctattttacattataatgactgggcaacttgatattgttttctagtcgttcccactcagttttctctgttacaatacatatgaaagaaactacgattgatggagaagagcttgttaaaatcggaaagttgaacttggtaagcatccaccttaatactactgtttcactcttaaacaccttatagagcagcttgaaattttgtccttgagacaaaatttttgtggtcactgggtgattagctttgtagtgggagaagaaatttgttaattacagaaaaaattattttgctggcgatttaatacattatgtatcctgtgagaatgaaagtctttgaatccaaatccaatagactcactttttatttttatttttaaaattaaaggttgatcttgcaggaagtgaaaacattggccgttctggagctgttgataagagagctcgggaagctggaaatataaatcaatccctgttgactttgggaagggtcattactgcccttgtagaaagaacacctcatgttccttatcgagaatctaaactaactagaatcctccaggattctcttggagggcgtacaagaacatctataattgcaacaatttctcctgcatctctcaatcttgaggtaagccctttgaaaggaagctgcaagtgtagtagctgtaattcttatttggctattatatattttaaaagttcatttactaggatggacacagtgactcacacctgtaaacccagcactttggaagtccaaggtgggcggatcacttgagcttaggagtgcctgggcaacatgccgaaaccctgtctctaccaaaaatacaaaaaattagctgggtttggtggtgtacaactgtggtcccagctacttggggggctgaggtgggaggatcacttaagcctgggaggcagaagttgcattaagctgagatcatgcaactacactccagcctgggtggcagagggagaccccatctcaaaaaaaaaaaagtatgtgtataaaaaaaaagaaaagtatgtgtatacacacacacacacacacacacacacacacacacacacacacacatatagtagggaaaaaaagttcatttagtagcttcatttttttttttttgagacaaatcccactcttgtcccccagactggagtgcgatgacgcgatctcggctcactgcaacctccacctcccaggttcaagcgattctcctgcctcagcctcccaagtagctgggattacaggcacctgccaccacgcccacctaatttttgtatttttagtagagacgtggtttcaccttgttggccaggctggtctcaaacccctgacctcaggtgagccgcccgcctttgtctcccaaagttctaggattacacgcgtgtgccactactcagcctagcttcgttcattctatgctataatgtaaaagaatctggacattgcatatgaatatatacaggaggacactcctgaagaagttatctttttccttcctggcagagtttttaaccttaaaaagccagtttcttaatggctttttccacacagtcttcaaagaaaattgctgtggtcattagcagtgggtggtgtatggagatttaattgaggacttagaagcaggccaagtgaatgctcgctagtgtggtagaggctgcttagagaacactgaagatggcgttggatgtgtgagaacagagaggaaaaccaagaaaagtaacaaagatggtaaaatgtacgcttattttattgctatcatctgccttaagtggaaattttatttatttattaatttttttacttttagaggtagagtctcatactgttgccaaggccgcagtacagtagcatgatcatggctcactgcaacttaaattcctggactcaagtgattcccccaaccacagcctcctcctgagtagctagtactacaagtgtgagccaccaggcctggctaagttttgttttgttttgttttaaatagagacagaggtctcactatgttgcccaggctggtcttgaactcctgggctcaagggatcctcctacctcagcctcccaaaatgctgcgattataggcatgagccacctcacttgacctaaatggattttaaaaagcttttttaggccaggcacggtggcttacgcctgtaatcccagcactttgggaggctgaggtgagtggatcatctgagctcaggagttcaagaccagcctgagcaacatggtgaaaccccatctctactaaaaaatacaaaaaattagctgggcatggtggtgcgcgcctgtaatcccaactactcaggaggctgaggcgggagagttgcttgaacccaggaggtggagattgtagtgagccgagattgcgccattgcactcaagcctgggtgacagagtgagactctgtctcaaaaaaacaaaaaagcttttttaaggtgtccaactgccccttcattaaaaaaaaatctttgttgagatttaattcacataccataaaattcactgatttaaagtatattaatttaataattctagtatatttacagagttgtccaaccatcaccaaaatctaagttttgaacattttcataacctcagaaagaaagcctgtacccattgaaattacttttccatttgccccactcccatcgctactgctttttgcatctatatatttgcctattctgggtatttcatataaatggaattacgtaataggtagttttttgtgactggcttctttcacttagcataatgttttcaaggttcatctgtgttgtaccagcaatactttattcctttttacaggtgaatattattctatagtatggatatgggatttttttgtttttttttttttttgagatggagtctcgctctgttgcctaggctggagtgcaatggtgtggttttgactcactgcagtcttcgccacccgggttcaagtgattctcctgcctcagcctcctgagtagctgggattacaggcgccaccaccatgcctggctaatttttgtatttgtggtggagacagggtttcaccatgttggccaggctggtctcgaactcttgacctcatgattcacccgccccggccttccaaagtgctgggattacaggtgtgagccactgtgcccggctgatataggacattttgtttattcatcagttggtagattgattgagctttgtggtttttttgttttgttttgtttttttgttttttttttttgagacaaggtccctctctgttggctggagtgcagtggcacattcactgtaacctcaacctcctggccttaagtgatcctcccaccttagactcccaagtaggtgggactataggcacatactactatgcccagctaatatttatttatttattgtagaaacaggatctccctatgttgccaaggctggtctcgaattcctgggctcaagtgaccctcatgccttggcctccaaagtgctggaattacaaatgtgagccatcattgagtttaagaatagtctaaaggaaattatcctaagggtcgagactctgaaaattgaagagaagggaaaaaaggattgaacaacttcctttttaaaggttgggcatagtggtcttaatgactagattttaaaattagatataactataaaatattacttgtaagttattatataacatattttagataacagaactacattattctcacaatatcttcagtaattgacctttcctttccatgacaggaaactctgagtacattggaatatgctcatagagcaaagaacatattgaataagcctgaagtgaatcagaaactcaccaaaaaagctcttattaaggtaactgtgaatttttgtagagtaatgtaatcttgtttgacaaatgtgaaaataagaaactgaagtgggagataatagttaaacaagatttgttaaattgcccatggaaggctttttatatagtgatttaaactaaatgtcttacatgttaacatatttttttctaatgctagtatgttgactttaccaactttatcaactgagttggtactcttagcaaaattttcatttatttacatttacaaaatttatttatttgcatttttgaggtataatttacatgccataacatccacctaatgtaagcatacaattcaatgatttatagtgcatttacagagttgtggagtataaccacgatctagttttagaaaatttgttatcactatccagtttccctttgctcctttacaatcatgtggccactgacctgctttctgtctacagatttgccttttctggacgtttcctataaatggaatcatgtaatatttggtcttttgcatctagtttcttttgcctagcataaccatttggggttccacttataacatgtatcagtagtttatttctttttattgctgaatagtattcaattatatgctgataatatgacatttggatcatttccactaatgccattgtgaacatttctgtacatgtctttgtgttgatgtgttttcatttcttttgggtagatatctagggatttaatttctgggttgtatagtaagtttatgctctaagaaacttttccatgtagctgtaccactttgtatttcctacagcagtttatgaggtctgcaatttctccacctcctctttaacacttgttatggtcggtctttttaattttaaccattctaaggagtataaaatggtacttcagtacggtttttttgtttttgtttttgtttttttttttgagatgaagtctcgctctttcacccaggctggagtgcagtggcacgatcttgactcagtgcaacctccgcctcccaggttcaagtgattcttcgacctcagtctcccgagtagctgggactacaggtgtgcaccaccacgtctagctaatttttgtacttttagtagagatggggtttcaccatgttggccaggctggtcttgaactcctgacctcgtaatctgcccgcctcagcctcccaaaatgctgggatcacaggcgtgagccaatacgcctggccccaatatggttttaattagcatttccctaatgactaatgatgttgaacatcttttcttgtgcttattatctatttgtttatcttttttggtgaaatgtctattcaaatgctttgcccaattttaattggtttgtcttattaagttgtaaggagttcatgtagtctagatacaagcccttaatgagatatgatttgcaaatatttcctcccagtctggctttactttttcctttccttgatgttttttttttttttaaataaagtttttagtattgagatgattatagattcacatgcagttataagaaataatacagagaaaacaggccaggcacggtggctcatgcctgtaatcccagcactttgggaggccgaggtaggcggattgctttagatcaggagttcgagaccagcctggctaacatagtgaaaccctcatctctactaaaaatacaaaaattagctgagcgtagtggcacgtgcctgtaatcccagttactcaggaggctgagacaggagaattgcttgaactcgggagacaggttgcagtgagctgagatcgagccactgtactacagcctgggagacagagtgaggctctgtctcaaaaaaaaaaaaaagaaaaaaagtaataatacagagaaatcctttgtacattttgttgaactatagaatattaccacggggatattgatattaataacaatccactaatctttcccaattttccttacatgtgtatgtgtatttaattctagacagttttgtcacatgtataggttcatgtatttaccaccacaatcaagatactgaacagttccatcaccacgaggacccttcatattgctcttttgtaaccacttttcttcccaccatatccttcctttcctggtacccagtaacctgtcctctatcatttcaagactgttattgattggaatcatacattatgtaaacgtttgagattgccttatttatttatttatttatttattttgagatggagtctcactctgttgcccaggctggagtgcagtggtgcgatctcagctcacagcaacctccgcctcccgggttcaagcgattctccttcctcactctcccaagtagctgggattacaggtgtttgccaccatgtccagataattttttgtatttttagtagagacggggtttcaccatgttcgccaggctgggtctcaaactcttgaccttgtgatccacccaccttggcctcccaaagtgctgggattacaggcttgagccactgcacccagcagatctttcttttttagtactaagtagtagtccatggtgagtatgtaccatacatacagtttttgtaaccattcacttattgaataacatatgagctaatttcagtttttctgctattacaaacaaaactgctattgacattcatttataggtatttatgtaaacataaatttttatttctctgggataattgcccaagagtgcaattgctgggttgtataataattgaatgtttattattttagggaactgcctgtttttcaaattggctgtatcattttacagtgtatgagtgatctgatttcttcacatcctcaccagcatttggtggtgtaacttttttattttagtcattctgataggtgtggtaggtgatagatatctcattgtggtttttaacttgaatttttctaaaggctaatgatgttgagtgtctttttaatgtgcttatttgatgtttatatatttatgtatatatagcatatacatatattgcatatttatatataacatatacatgtatatatatatttatttcccattataatttatttggggaaatatctgtatatttgtcctgtagagttttaccatagtatcttttgacgtgttcctctgttctttgtattttctttgtaaatcggtagctgaatcttgaggcttgattaaattcaagttttgtcttatttatttttggcaaaactaattcataagcagtagtgtcttcttccatttagaagtatgtaatgtctggttctttgtcttttttttttttttttttttgagacggagtctcgctctgttgcccaggctagagtgcagtggtgccatctcggctcactgcaagcttcacctcctgggttcacaccattctcctgccttagcctcctgagtagctgggactacaggcgcctgtcaccacgcccggctaattttttgtatttttagtagagacagggtttcaccatgttagccaggatagtcttgatctcctgaccttgtgatccgcccgcctcggcctcccaaagtgctgggattacaggcgtgagccaccgcgtccggccagaggtatagttcttataggaaaggcaggacacatgcttgattaatttcctttatttgccaattttgagaataatgagttggtttcctaggtttcttagtgtcattataaactcctagatttaaactatttgtgttaacccattgtagttgttctcctcaccgatgctcagattggctcatcttaggccaggggtatgttagtctgttttcatgctgctgataaagacatacccgagactgggcaatttacaaaagaaagaggtttattggacttatagttccacatgtctggggaggcctcataatcatggcggaaggcaaggacgagcaagtcacatcttacgtgggtggcagcaggcaaagagagagagcttgtgtggagaaactcctgtttgtaaaaccatcagatctcgtgagacccattccctgtaatgagaacagcatggaaaagatccgcccctacgattcagtcatctcccaccaggtccctcccgcaacgcgtgggaattatgggagctacaagatgagatttaggtggggacacagagccaaaccatattaaggggttacatcttcaagtggcttactgagtccttttgattaacctagtaggctttgcttagcttatttccttgtcttatttgacaagatgttccgtattcatcttgaatattttctgcctcagtcctggaatcagatgcttttataaggaatcctggttcattttagtgtgaattactcctaccaacctgggtactggaggttgtggtttttcttgggaagtccatatttctagaatgagtgtatttaaaaaggagctttgaaagactttatttctaaacaaattaatattgattaaaaagtatggttataactttttatcatacttctttaagttttaaaagacataaaaaggctaactttacattttatttgttgcatgtccttcccaaactgaatgaaaaaagtactaaactgacacctacaacattcctcttgtgtaggagtatacggaggagatagaacgtttaaaacgagatcttgctgcagcccgtgagaaaaatggagtgtatatttctgaagaaaattttaggtaagcccttggctatggagttaatttccaagaataagcatttctgataacaggctatttgaagtaaaacttatgtagcagtaagtaaaatctttatatccagtgccgataaatacttcattttgtgtgtgtgtgtgttttcttttgagacaaggtctcgcactgtcacccagactggagcacagtggcacaatcttggctcactacgtcctcagtctcctgggctcaagcgatcctcctgcctcagcctcccaagtagctgggattataggcatgagccaccacaccctgctaatttttgcatttttttgtagagacagggtttcaccatgctgcctaggcttctattttgttttgacattaacaagtagctatcaaacactttttaaaaatcttttactaacttttaatttttaaatcattaattcatgtgaagtttcaagaagagtacaagagaggtttcatgtattcttcacccagtcttcctcagtggttatctcttaaataattatagtacaaggctggatgtggtggctcacacctgtgaatcccagcactttgggaggccaaggcaggcagatcacgtgaggttgggagtttgagattagtctgaccaacatggagaaaccccatcactactaaaaacacaaaattaccctgtgtggtggtacatgcccgtaatcatagctactccagaggctgaggcaggagaattgcttgaagctgggaggcggaggttgtggtgagccaagatcgcgccattgcactccagcctgggcaacaagagtgaaactctgtctcaaaaataagtaaataaaataatagataaataaaaaataggcgcgataaataaaaaataggctgggcgccgtggctcacgcctgtaatcccagcactttgggaggctgaggcaggcagatcacctgaggtcaggagttcgagaccagcctggccaacatggtgaaaccccgtctctactaaaaatactaaaattagccaggcatggtggcaggtgcttgtaatcccagctactcgggaggctgaggcaggagaatcacttgaacctgggaggcagaggttgcagtgagctgagatagcagcattgcactccagcctggggaacaagagcgagacttcatctcaaaaaagaaaaaggaaaaaataataataaaataaataaaaaataattatagtacaatatcaaagctgggaagttgaccttgatacaatatgtgtattagtttgttcttatactactatagagaaccacctgagactgggtaatttataaagaaaagaggtttaattggctcacagttccataggctgtacaggaggcatggctggggaggcttcaggaaacttacaatcctggtagaagagctaaggagaagcaagcacatattcacatggcggcaggagagagaaagtgaagaggaaagcactgcacacttttaaacaaccagatcttgtgagaactcattcactatcatgagaacagcaagggggaagtccatctttatcactcggttatctcccatcaggtccctcctccaacatgtggggattataattcaacatgagatttcagtggggacagagaaccagaccatatcaagatgtgtatatagtagttctatgccattttgtcacttgtatagatttgtgtaaccaccactgcaatcaagatacagaactatcctatcatcacaaggatctttcttgctaattcactgtagtcacactcacctcatcttttccatgattcctaacccctggcaaccactaatctgttcactttttaaagccctggagtaatttgttcaaaggaaagcttttattgaggcccattgtataaaacaacaataataacagagaaaacaaggggaagaaggcaagtgggatgctaaggactataacttgaaaattcctgattgtgtttatccttgaagatattaggaagcaagactttcacagagcattttttaaaagttaatagtgataaaagatattagacctaataataaccagaagcattttagtataatcttttactgaacttttttgtagatgttaacactctaatagtatataaatcatttaataaacttagttttttctgtgttacttccaactgtcataatgtattccatgaatgtgtaagatgccctagaatcagaacaatgtaagattgtgggttagtgaacagtttaccatcactaatggaggtgttctttttttgatgctttagaagtaaaaaataattggtgaggcactcaatcctggcctgtagtctttagaaatgatattgattattggaggctttcatctttctgattttatttttgaacttaagaagtaactttggttttcatttgtttagtcccatgattgaaaatatggtgtttgctctctttttttttaacttttattttagtttcaggagtacatgtgcagatttgttctatagatatattgcatgtaacaggagttggtgtacatattattttgtcacccagataataaccatagaacccgatggatagcttttcaatccttgctctcctcttaccctccaccctcaaagaggcccaggtgactattgttcccttcctcatgtccatgtctgctcagggtttagctcctacttataagtgagaacgtttggtgtttggttttctgttcctatgttagtttgtttaggacaatggcatccagctccatccatgttgctgcaaagaacatgatctcattctttttttttttttttttttttcgagacagtcttgctctgtcacccaggctggagtatagtggtgtgatctcggctcactgcaacctctgcctcccaggttcaagtgattctcctaccccagctgcccgagtagctgggattacaagcacctgccaccatgcccagcaaatttttttttttttaagtagagatggggtttcaccatgcaccatgttggccaggctggtcttgaattcctggcctcaagtgatcaactcaccttggtatcctggcgtactgggattacaggcatgtgccactgcacccagccatcttgctcttttttatgcctgtgtagtattccatggtgtatatgtaccacattttctttatccagtctgctgtggatggatagctaggttgattccacgtctttgctgctgtgaatagtgctatgatgaacatatgtgtgcatgtgtctttatggtagaacaatttatattcctttgggtatatacccagtaatgggattgctggctcaaatagtatttctgtgtgtgtgtggtttttttttttttttgagatggagtcttgctctgttgtccagggtggactgcagtggcacaatctcggctcactgcaaactctgccccccaggttcaagcaagtctcctacctccgcctcccaagtatctgggattataggcacccaccaccgcacctggctaatttttgtatttttagtagagatggggtttcaccatgttggccaggctggtctcgaactcctgacctcaagtgatctgcccacctcggcctcccaaagtgctggattacaggtgtgagccaccatgccctgccggtatttctgttttaagttctttgagaagtcgccaaactactttccataatggctgaactaattttcattagtagcatataagcgttcccttttctccacaactttatcaccatgtgttattttttgactttttaataatagccattctgactggtgagatggtttctcattgtggttttgatttgcatttctctaacaattaatggtgttaaacatagtttcatatgcttcttagccacatatatgtcttcttttgaaaaatgtccacatcatttgcccacttttttttttttttttgagacacagtttcactgttgcccaggctggagtgcagtgtggcacgatctcagctcacttcaacctccacctcctgggttcaagcgattctcctgcctcagcctccgaagtagctgggattacaggtgcctgccaccatgcccggctaatttttgtatttttagtagagatgggatttcaccatgttggccaggctggtcttgaattcctgacctcaagtgatctgcccacctccgcctcccaaactgctgggattacaggtgttagctaccgtgccccgctgggtgtatatgattttatacttagaaaaccccatagtctctgtccataagctcctagatctgatcaacaatttaagcagagtttctggatacacaatcattgtactaaaatcagtagcattcctatataccaataatgtccaagctgagtgccaaacaagaatgcaattccattcacaatagccacaaaaacagtaaaatacctaggaatacaactaaccagagaggtgaaggatctctacggtaagaattataaaacactgctgaaagaaatcagagttgacactaacaaatggaaaaactttccatgctcatggataagaagaatcaatattgttaaaatggccataccacccaaagctatttacagattaaatgctgttcctctcaaactaccaatgacattcttcacagaaaaaactattgtaaaattcatgtggaactggaaaagagcccaaatagccaaagcagtcctaagcaaaaagaacaaagctggaggcatcgcattacctgacttcaaactatactacagggctacagtaaccaaaacatcatggtactggtacaaaaacagacacagaccaatggaaccgaatagagagcccagaaataaagccacacacctacagccatctgatcttcgacagaacatgcaatggggataaaactgcctgttcaataaatggtgctgggataactgcctatccatgtgcagaatattgaaactggaccccttccttaacgcccatatacagaaatcaactcaagatggattaaaaacttaaatgtaaaacctaaaactaaaaacccttgtaaaaaacctaggtgtttgttctctaatacacatgaggcataatctgagatagttttgtctgaaaacgcttttggaattagtacagtgtcagtcagagaagaatcacaaaaactacagccaacatttaaaacaggataatgctttatttaagccaagcttaatagacattttaaaaccatatcaaaatcatctcatccatacagtaacaatgttgtattaccccttggcattcactataaaaaagcatttcaaataatcccgttttacataaaagatctatttctatttattttattttatttttatttttatttttgagacagagtctcactctgtcacccaggctggagtgcagtggcgccatcttggctcactgcaagctccgcctcctgggttcacgccattctctcgcctcagcctcctgagtagctgggactacaggtgcccgccaccacgccctgctaattttgtttttgtattttagtagagacagggtttcaccatgttagccaggatggtcttgatctgctgacttcgtgatcttcccgcctcggcctcccaaagtgctaggattacaggcgtgagccaccgcgcctggctgtagaagatccatttttaataaaaagctaatatatttcatcaaaagactattagaattaactcttctcttacagctcttttctagcttttcctttagtcaacaatatctctagctaatacgttaagggaatttgtattcacggaagaatctttgtcatttaagcataatgtgaaatagaaaattgttggttgttatcaaagaattagatgagcaaatacaggcattcatttctgaaactgactaatactcaagaaatcagagacccattaaagtgggtttggaagacctgtgagctttgcgcttgagaaaagcattctctattttactttttatgacttcttttgactttgacttcatcttctgatatttttgttgaatttagaaatttttagtttctaaaaactcttttctgccatccctgtctctccttttgaaaaatatagcatccttttattttatagatctattccttatctcagaaacattattaatgttattaaagttttcttttatgtttttctttcctttgggatcttttttttccctgttgtgatatctgtcatttgtatttattttcttcaaatgtctagtgatttttggctggcaattaagatggattagaagctttgtacatgggtgaggattatggacctgtaagttcactatagatgaaaaagtggtgatctcagtcttaagtctgggcttccatcagatatcattctttgttggattttttttcttttgttctagccctcagtcttttctgagaagatttgcccagtttgcttggagatttttctagctgctgctattttttgattagagtgggtatagggggctgaggattccatcattttgtatgtagatttacacttaaatgctcatttctagtccctaaaccttctacagtccatgatgtctagtgaaagtgaacctggaaattctgctgcaattcctatagactagtggctgtcaatggaagtggtgttgggggactggtggtggtgggtggttttgtcccccagaggacatttggcagagtccagtgacattttttatcatcatgacttggatggtactgaacatcctaaaatgtacaggacatccccacaatgaagaattatttgatccactagtgctgaggctgagaaactctgctctagagagtaatcctttgttctcatgagggttatgcggtggggtgagagtggtgtttgtgcgtgttgcagcagcagggggtgtaattgctctgtatacatactttaagtctcagtttttaacccctaatcttaccccttccttctaagatacctgatgccttcaagtcccacatttttccagcattctgtggggcatatttatattctgtatccctgattatagacacttaggttgcattccctcctctctctactttgagttatagtccgtcctctgttagctttctagcttctcaaatctggaacacacatgcttttcccctcataggtagggattcttagtttcagaattgagggcaagggaaaaatatttcatttataaaacaaagacaaggaatataatttgttctttgtaatttgtatttattgcttattgacacaggtatcaagtgacacttgggtatcaagtgatggtgataaatgttggaaatgagtttgtgtagctgtcacaattgtgttagaatacattttataggagttagaaaaaaatattaactgttaaactcatattaaactttattttagagtcatgagtggaaaattaactgttcaagaagagcagattgtagaattgattgaaaaaattggtgctgttgaggaggagctgaatagggtaagcacttaaaatgatatttactgttatgtgaaaagcaaatattgaaagaaaattttagaatgaaagatctaatattttttccttcaagattttttttttttagacggagtctcgctctgtcacccaggctggagtgcaatagcgtgatctcggctcactgtaacctctgcctcccagggtcaagcgattctcctgcctcagcctcccgagtagctgggattacaggtgtgcaccaccatgcctggctaattttttttgtatttttagtagagacagggtttcaccatgctggccaggctggtcttgaactcctgacctcatgatctgcccatctcagcctcccaaaatgctgggatgacaggcgtgagccactgcacccagctccttcagatttttttggaaaaaaaaaaaagattttattttgctgacccttatactgaaagtaagttatatcatgattttttactatcattaatcacatcaaaaaagctgacagcttatattaataaaacattacaagaaattaactgaattgtttgattttgttattgaaactacaaaatagtgaatgctgaagcagttttgttaacatgtttatcagatgaaggaatacagatattgggagagactggatgttaaataaaagtaatataactagggtaggcaagaggcctgacctttcagggccaccctcatattaatacctttatttatttatttttaattattttttagagacagggtcttgcttgatgcccaggctacagtgcagtggtgtaatcatatcttactgcagcctcaaacttctggtctcaagcaactctcctgcctcagcctcctgagtagctggacttcaggcatgcactaccatgcccggctaattattttatttttttgtagagatggagtcagtctcgctatgttgcccaggctggtctcaaactatggggctcaagtgatctcctgccttggcctcccagagtgctggggttacaggtgtgaaccaccttgccaggccacattaacactgttatattcaaatccattgacaatgttgaaggaaactgaagaattaatagtactacaccagacctattatttaatctcaaagtgttgagtaagattacagaaagaaacaggatgacatatttgtgttaacctaccgggtaacttcttacaacttttgcatggaaataatttgtttcatttttctaatcttatgaactagctagatatcctaccagccagctcagcgttttttaaattcttatatttaggttacagagttgtttatggataataaaaatgaacttgaccagtgtaaatctgacctgcaaaataaaacacaagaacttgaaaccactcaaaaacatttgcaagaaactaaattacaacttgttaaagaagaatatatcacatcagctttggaaagtactgaggagaaacttcatgatgctgccagcaaggtttgtcccttgtgttgatttgtactcatattaagtagagaatgggtagaaaaaattttctgtgcttaagcattaaatattctgtttattcaccccaaatggtatttctgtccatttaaaaaacattattttactatttcatccatgtttttctcactggagatgtcgacttatgaaaaaactactcctgctcctggagttttgaaaatagaacataacttagctgggagtggtggctcacgcctataatcccagcattttgggaggccaaggtgggtggatgacctgaggtcaggtgttcgagaccagcctgaccaacatggagaaacctgtctctactaaaaatacaaaattagccgggcgtggtggcgcatgcctgtaatcccagctactcgggaaggctgaggtggaagaatcacttgaacccgggaggcagaggttgcggtgagccgaaatcacaccattgcactccagcctgggcaacaagagcgaaactccgtctcaaaaaaaaaaaaaaaaaagaaaatagaacataactttataatatattttgtagacatttagaatagtgatgctgtgatgctttttctttgtggggatgattgaacctaattagtcattaagaatttagtatgttctgtccaggcatggtggctcacgcctgtaatcccagcactttgggaggccgaggtgggtggattgcttgaggttaggagttcgagaccagcctgaccaacatggtaaaaccccatctctactaaaaaaaaaaaaatacaaaaattagccaggcgtggtggcacatgcctataatcccatctactcaggaggctgaggcaagagaatcacttgaacccaggaggcagaggttgcagtgaaccgagatcatgccactgcactccagcctgggtaacagagcaagactctgtttcagaaaaaaaaaaaaaaagaatttagtatgttctgatgatgaaagatgttgaaagtatttaattttttttttttttttttgagacggagtctcgctctgtcgcccaggccggactgcggactgcagtggcgcaatctcggctcactgcaagctccgcttcccgggttcacgccattctcctgcctcagcctcccgagtagctgggactacaggcgcccgccaccgcgcccggctaattttttgtatttttagtagagacggggtttcaccttgttagccaggatggtctcgatctcctgacctcatgatccacccacctcggcctcccaaagtgctgggattacaggcgtgagccaccgcgcccggcctttaattttttattagttgtactttttttttttgagacagactcttgctttgtagcccaggctggagtgcagtggcatcatctcagttcactgtaacctttgcctcccgggttcaagcgattctcccgcctcagcctcccaagtagctgggattacaagcgcctgccaccacacccagctaattttgtatttttagtagagactgggtttcaccatgttggccaggctggtctcaaactcctgacctcaggtgatccacctgcctaggcctcccagagcgttgggattacaggtgtaagccaccacgtccggccattaggtgtacttctgaggaaatagtagaacatagaaggaaaaaaatttctgaggaagcataattattgcaataactgaaaaaatcagttttccttgcttgtgtagatggctacaggaagggaaataaacattactgggcatctggataaattagcatgagttaaagcatttcttctgatacaatgtctaaaattgactttttttttttgagacagagtctctctctgtcaccccggctggagtggcagtggcacaatctctggctcactgcaacctccacctcccaggttcaagcaattctcctgcctcagcctcttgagtagctggaactacaagtatgtaccaccacacccagctaatttttgtatttttagtagagacggggtttcaccatgttggccaggctggaaaatttactagttcttatcaagataaatccttgtgtagatactttcatcagattcctttcaccgtatccattttgtctaacacttatttttaaaaatatagctgcttaacacagttgaagaaactacaaaagatgtatctggtctccattccaaactggatcgtaagaaggcagttgaccaacacaatgcagaagctcaggatatttttggcaaaaacctgaatagtctgtttaataatatggaagaattaattaaggatggcagctcaaagcaaaaggccatgctagaagtacataagaccttatttggtaagttcaggctgttctgttctagtcttgatgtgttaagtgtaatgttgatttcaaaactgataattttgtgaaacatagatgacggtgtcaccaatactctctaccatgcacaaactatttgttcagggtgaagattaatgcttttattgtctttgaattaaaacaaatcttttttccctccccaccctcccttctgttttctataaaatgttacatttattaagtaactaagtatataaacgttagaagtagaagtcctctttttccctgactccggctcctgaccctgggtcattgaccataggtgttattgttaaatttcttgggcctttttctggaaattttttgtgcataaacattctgcaactttttttggggggggcatatatatcttgatggtttgctatattgtcagaatatgtttgtgtctcattgtttttaactattatctccctttagaaaaaagtatgtttatttagtgtgaaatactatcctcattatggaaaatttggacattcagaaatataaaaatttaaaaaatcatctagactctagtctcactaagccaagcactatactttttggtattgatttccagttttttttttcttctgtaaacttaccataattctgtatattatttttagttagagattaattgtagaatattctaattctttgtgtactatgaattatagttatgggtctgatacacttacaaatatgttaagggcttacagagcactatagaaaattgtaatgtatatttaaatatttccttgctttgtagtgagccagttcttttaagctcgttattacaaattctacaacaagggtatacttttgtcaacttctttgaaatggtttgaacggtatttaatatatttatgtcaaagtttacatctttctgtttttgtttgttataggtaatctgctgtcttccagtgtctctgcattagataccattactacagtagcacttggatctctcacatctattccagaaaatgtgtctactcatgtttctcagatttttaatatgatactaaaagaacaatcattagcagcagaaagtaaaactgtactacaggaattgattgttagtacatcctttaaaatatttttgaagggttgcatttgataagtatttgataaaatattttgaagggttacatttgataagtctttataaacaatgttaactgctattctttcttcctgagctttactagacacagtcatagacacgtcactgtgagagactacatatatatatattttgttttgttttgttttgtttgtttgttttgagatggagtctcgctctgtcgtccaggagtgcagtggcgtgatctcggctcactgcaagctctacctcccgggttcatgccattctcctgccttagcctcccgagtagctgggactacaggcgcccaccaccacacccggctaattttttgtatttttagtagagatggggtttcaccgtgttagccaggatggtcttgatctcctgaccttgtgatccacccgcctcggcctcccaaagtgctgggattacaggcatgagccaccgtgcccagccagcctctccttttctttatttgtatttatttatttttttcagcctctccttttctcggctcactgcaacctctgcctcctgggttcaagcagttctcttgcctcagcctcccgggtagatggaattataggcatgtgccaccacgcctggctaattttcgtatttttttttagtagagatggtgttttaccatgttggtcaggctggtctcaagctcctaacctcaagcaatccacccacctcggcctcccaaagcgctgggattacaggcgtgagccaccgtgcccggccgagagtacgtttatatttttaaagacagatctctccactgtttattctctcccagaaagattattttcaaatgtatggaactaacttttgaaacctttttcactcatgtcttgtaacattaggagtagcagttattagtgaggcttctaatgactaaagggcaagtttagcaccacatgatatcaagggacttgttagttggcccagaaattggcaagtcactctttccccaggggtcctggacccaaccagaaggggatattgggtagctgattttaaaactacagtaatatatgatagtaataatggtgcaagaaaaatatcttagaattctggggacacatatcacttcttagggttagatctgtgtggccccttctgggccataactataaatcttttctccagagttctatggaagtcactcatctaattgcacttaatattacctccttcatacttgatttatatatagtctttattttataattgtatggttggtctaggaagttcttagccatataatttatttgttttctttgtgcagagtctttgcctccctttttcagcttaacaatatttattaaacattttccaagtaaatactacaaatgttagctgaccctctgcctcaattcagtgcttagatgacattatttgataggttttctcaatcacccaaatttgacaaaattaaaagatatcctgtcagtactaacttttcaaatattgattcattcattaaatggtggtctgtatatatataggcatacttcagagatattgcaggtttgcttccagaccactgcaataaagtgaatattacaataaagcaagtcatgaattttttgctttcccggtgcatataaaggttatgttgaccaggcgcagtggctcacacctgtaattccagcacacgcctggtgggacaatcagaacacaacgtttatcagttacatttgctgtcttataggggtacagtttatggtaccccaagacaattacaatagtaacatcaaagatcattgatcacagtgtataatgaaaaagttagaaatactgtagtagttaccaacatgtgatgcagagacagaaagtgagcacatgatatttgaaaaaagtcactgatagacgtgctcaaggtagggttgccacaaaccttcaatttgtaaaaatttggtatctgtgacacatagtaaggtgaagcacaataaaataagctatgcctgaattgatacatttctacttaccaagttacaatttttgcttgaattaaaagaaaagaggcatgttgctctcacaaaattagttgaaattggtatgctagctcttctttccaaaagaatgtcagtagacctataagtatttactaatgtatttctgttatacttcctcagccctatcctaccaaaaggagattagatcaggattttttttctttttataaatatttccaatctatactacattcttaatttccctatttcttgacaagaacaacatctttcacaagttcttctgatacaataggatgtaagtcatctcagatcttcaaagttaagtacttccagcccaagggctaatcttgatgactacttggtctcagcctttttgactggtaacctaaacttgtttgaaatttattttcttaaaatatacctgtaggtttttaaaaatttattttgtttggagtgctgaaatcttattaactgtcattttcctcttttgaattcttctgacttctatttcattaaactattaaatagttctggctgggtgcggtggctcatctcagcactttgggaggccaaggtgggtggatcacttgaggtcaggagttcgagaccagcctggccaacatggtgaaaccctgtctttactgaaatacaaacattagctaggcgtggtagcaggtgcctgtaatcccagctacttgggaggctgaggcaggtgaatcgcttgaacccaggaggcggaggttgcagtgagccaagatcacgccattgcactccagcctgggccacgagagtgaaactatatctcaaaaaaagaaaaaaagaaattctgtgttttcactgggcttgaaaaaagagaaattattatatttattgtaatataataaattattgtattattgtattgatttatctatgtagagtataaaaaatggagaatggggccgggcgcggtggctcacgcctgtaatctcagcactttgggaggccacggggggcggatcacctgaggtcaggagttccagaccagcctggccaacatggcgaaaccccatctctactaaaaatacaaaaattagctgggtgtggtggctcacacctataatcccagctactccggaggctgaggcaggagaatcacttgaacccaggaggcagaggttgcagtgagccaagatgttgccactgtactccaacctgggtgacagaatgagactccgtctcaaaaaaaaaaaaaaaaaaaaagaatggagaatggaaatgtaaattttaatgtgaatgtttagctaccaaagtatttaagatatcatttagaaaggtttacagaagtggaaatattctttttaaagacctatttgtttatttctgaaaccagaatgtactcaagactgatcttctaagttcactggaaatgattttatccccaactgtggtgtctatactgaaaatcaatagtcaactaaagcatattttcaagacttcattgacagtggccgataaggtaacaaatgctatgttcttaatatctcaaaattgatgtgttgtttaagaaggaaactcatttttgtttcttcaaagatagaagatcaaaaaaaggaactagatggctttctcagtatactgtgtaacaatctacatgaactacaagaaaataccatttgttccttggttgagtcacaaaagcaatgtggaaacctaactgaagacctgaagacaataaagcagacccattcccaggtatgttgtttagcggacttggggagtacagaaagagagttttaggatgatttgatatgacttgataattaatctatgttacacaatctgaatactgtaaaagctgaaacctgaaaataccatagccactgttgcttataacagtaattattgtagaacaattgagaatacttctcttaatatttgaagttttgctacatctagaaccccatgcagaaccacaatatgacaaaacagtccttttctcacatcaagatgaaagatgaatctggaaaaacatacctttagagaagaatggttataacatttaaagtgaaaatgtatctacattaaaacctgctaagttgtttctaggatggcatggatagttgtctttcataaaccaagtcctactttctcttatttctgtctcactgatagacatttaaaacatagtaaatcgatacaacttttaattcttattgattataaatgtaattcatgatttatcttccctgtaaactgttcctcattatatgaggctttaaaccaaaaccaagccttcaaaccataatctgtaaatatcagatatctgaaaaacagcttctggtattcttaagactttaataatgactgtctaaagttttattaaatgagcttattataatatgacagaactcttataatagttaacatttattgagcaattcactgtgtttattcctcccatcaatatagatataaattctattactagtcagatttttaatgaggaaactgagaccctgtgagcatctaatagtatgtagatcatcttgcagaaggtggtagtgatcatactacctgaaaagcatccatgtttgagtggctcttttgtgtgttttttggcaacttaaaactgcagcattttctcatacatctacatagggtatttcccttaaacccgttgagaactttttaggtgtatattctaaggctgatcccctttttataaatttgctgttttgaaatgcttaaaattgttagacagctctttaaaaaaacaatacaaaaaaatctgatctgaaaagtatcttagcatgaatggtttggctttcctggctttaaggaagcaagttcagtatgtgagctatttcttaggttttccagaacttgaaatgagcactactaaaataattatgtaaaactttgaacacatttacatatagataaatataatacctgcattagcattcaaattattaatctgataatacctttgagactagtaaaaatactgacagactttattcataatcagaatgttagatatgtattgtcaactgatgtgttattcagagatactggccaaccagcagactgaagagtgaataagaatgttggatgcattttcagctcttctttggtcattaggatggcttcttcattttgcaatgtagcatgttatatgcctataagagcttgttttcaaagatgtaaaatatgagcaaagataagactatttacattttgttaatatgatccaactaggttctgtaacattttttagctccagtaattgataatatttttggattgcttgacccgttagtatatcacattaattttcccttctagcagtgttatcagttaaaaagcaactatatatatctgtcaaagtgggtcttaaacataatgtgatatatgggttgtttgattagttttgaggtacactgaaagtaatttgttacttacagctaaaatagtaaagtttgctaattatttactttttaaaaaatcctggctggatgtgatggctcatgtctgtaatctcagcactttgagaggctgaggcagggtgatcacttgaggctaggagttcaagaccagcctggtcaacatagcgagatcacgtctctacaaaaaaaatttgtttaaattagccaggcatggtggctcatgcctgtgtagtcccaactacttggaggctgaggaaggaggatcccttgagcccaggaggttgaagctgcagtgagccttgattgtgccactgcactacagcttggacaacagagtgagaccctgtctctaaaaaaaaaaacaaatcctacattttaatatcacttccactgctttcctctgtagaagaaaggtaaagttaactttatctcttgtcaagaatttatataattctcacctatggacaatacttcttgttttgttatcagtcataaaaaatgttcaagtgtcataattttaagtctcttcacttcccacacctttcttacaggaactttgcaagttaatgaatctttggacagagagattctgtgctttggaggaaaagtgtgaaaatatacagaaaccacttagtagtgtccaggaaaatatacagcagtaagctatttttaaattctcttaaacttttctgtaagtctgaaattatttaagaagaaaaagctttaaatagtacaaataattcctctgtgtactttcaaatttctcttttgttaatattttattatgtatgtgtgtatgtatatatatacatgcatataaatgtcttttcattgcgtatttgtgctctcttttaagacattgaaaaacctggctgttacccacaatatattttcgaatttcctcaatcttagaaaacacactaagtaatttcacaatttctaacctatattactgatgaaaaatatactaactagagcagggtttggcaaactgtggctagcaggctggatgcctgttattgcaaataatttcattggacactgtttacatgttgtctttggctgcctttgcactgcagtggcaaagttgagtcattgcatccaggtcattgaacaatagcctaaaatatttgctatctggcttttcaagaaaaagtttgctgattcctgtattagggttttgttttttgtttttgtttttgtttttgcgacggagtcttgctctgtcacccaggctggagtgcagtggagtgatctcagctcactgcaagctccgccttccaggctcacgccattctcctgcctcagcctcccgagtagctgggactacagatgcccgccaccatgcttggctaattttttgtatttttagtagagaggggtttcaccatgttagccaggatggtctcgatctcctgacctcgtgatccgcccgcctcggcctcccaaagtgctgggattgcaggcgtgagccaccacgcccggctctgttttgttttttcagacaaaaacaaacagcctgctctgtagcccaggctgaagtacagtggcgcgagtgcagtggtgtgatcttggctcactgcaacctctgcctcctgagttcaagtgattctcctgcctcagcctcccgagtagctgggattacaggcacataccaccatgcctggctaattttttgtatttttagtagagatggggtttcgccacgttggccaggctgatcttgaactcctggtctcaactgatcctcctacctcggcctcccaaagtgctgggattgcaggtgtgagtcactgctcccagcctgtattagagtttaatgttgctttgtagcctcattgcttgccagttccgcatacttaacatacactacagtcagacctatgttttcttttaggaattttataactttatggtttaacatttatattcatgatccatttaaaaatttttataaaacataggagatttgtcaagtttcagttttttgcctattgagtattctatactcatgaggagaaagatactatatttaccctatttttccccatttaattctgaaattaaacttcctaaagtttcaagctttctttggtgggaagtagtctttaagggtgggtctgctggacagaaattgtttttctttgtctaagaatgtcttgatttccccttcattcctgaaaggtattttcactggctgtggaattcagggttgacaattatttttttccagcatttgaaatatttccattttcttctggcctctatgaaatgagaaatccactgccattcaagtaattgttcccttataggcagtctccctatagctgctttcaaaacttttttgtctttagaaacttgattatattttgtctacttatatttcgttgagtttattctatttgggttttgtttagcttcttgaatctgtaggcttatgcctttcaccaaaacttgggaaattttcatctattaattctttgaatatttttcagccctatactctttttcatctgcccctatgactttgatgacacaaatgttagatcttttattttggtccctcaggagatatgtagaatatatttcttatagatacatatattctctttgttgttcacattggggaaattctattgatctgtcttcatattcactgagtctccttctgtcatctctaacctactgttaaacccattcaatgaggtgttttttcagttattgcttttttatttttagttttataattttcatttgctttttttataccttgtttcttagctaggatttttttcttttccaggagtattttaatttctttttggagcattttttgatggctgctttaaaatccttgccagacaattccaacatctgagttttcttgttgttgccatctattgattgtcttttctcattcaacttgtgatttttgtggttcttgatatatgataagtgatttcctattgtaccttgaagattttgggtattatgttaggagattcaggatcctatttaagtattttttagctggcattcaccctgtttaggcttagcatacagatccaggctcacttttatgggctgtggttccactgacaatttagtttttagagcccttgcagtgttattctgataatgctttgtttgtgtgctacccacatgagaaaaatttgtattctgcttttgttgcatgaagtgttctgtatgtgtcactttgatcaagttgattgatagtgctattcaggtcatccacggccttactgagtttctgcctatttgttctatcagtgacttagagaggagtattgaaatctctaattgtagatttatctattttttttattagttctatcagtttttgcctcgtgtatctgaaactctgttgttgggtgcatatacatttaggattattatatctccttggagaattgacctctttatcattatgtaatatccacttttatttctgataagctcttgttctgaagtctgttttgtctgaaatgaatacaggttttctagctttcctttgattgctatttgtatgatgtatccttctccatctctttacttttggtctaagtctttatatttaaagtgggtttcttatagacagcatgtagttgggtcttgctttttcatcaaatttataatctatgatgttttatttttatttatttatttgagacagagtcttgctctgtggcccaggccggagtacagtggtgcaatcttggctcactgcaacctctgcctcccgggttcaagtgattctcctgcctcagcctcctgagtagctggggctacaggcacacaccaccatgcccagctaatttttaaatttttactagagatggggtttcaccatgttggccaggctggtttcgaactcctgacctcaagtgatttacctgccctggcctcccaaagtgctgggattataggtgtgaggcactgcacccagctgcctttcctcatttaaattgagcactttttatgtttttatctcttccattgacttatttatactttttaaatattccctttttagtagtatgtctaggatttaaagtatacattttaagataatttgaatttgtatacattttaagataatttgaatccattatcaaataatttgctgtttcatgtgtagtgaaaggacattataatagtatattcctgtttcctctttcccgtttgtcattattttcatatgttttacttaggtgtttatatgtgcaataaacacctaatacattgttacttgaattgctttatctattttcttttttaatgtatctactagatttttttttttttttttttgagagggagtcttggtctgtcacccaggctggagtgcagtggtgcaatcttggctcactgcaacctctgcctcccaggttcaagcaattctcctgcctcagcctcccaagtagctgggattacaggcacctaccaccatgcccggctaatttttgtatttttagtagagacgggggtttcaccatattggccaggctagtctcaaactcctgaccttgtgattgcccgcctcagaaatttttaattgcatatgtggcttctattatacttctgttgaacagtgctgttctggaactctagctatcatttatatatccctacctaacttctgtcatttgtttttcaaccctgtttttgatcctgttaagtatagcatgttccattgtgaactcttcctatatgctgaatcaaaaaagtatgtcctactttttattcctagtatctagactgatggatttctaggccattccatagccgtggaggaaatactagagtaggattgaagtaggaagggaagtatgatatactttcttaaggcccatgcaaatcatttttcctgctttcctgacatttattgtctacaccagagtttcccagtatggtctagggactttgtattcatcacccaggaatctaggtgatgtttatgtacacactgcacataactgcgtttggcatttattgtcatggcttatagtacttttaactcaatctcgtcttcccattaagttgtgagattttgttttgttttttttatttgagacagagtcttgctctgtcgcccaggctggagtacaatgacacaatctcagctcactgcaacctctgcctcctagggtcaaccaattctcctgcctcactctctcccaagtagctgagattacaggcacccaccaccacgcccggctaatttattgtatttttaatagagacagggcttcaccatattggccggactggtctctaactcctgacctcaggtgatccacctgcctcggcctcccaaagtgctgggattagaggtgtgagccactatgccttgcccttttttcagtcattgtgactttcacgtgtaggtttggtttttaacatctttgctgactcacttggtttacccacgtggtgtaccatctagtggtaatagagagtcacttcattccacaaggtttaaatcttgtaagataacttggaatgctattatagggcaacttaccgagatggaaattatcaatgaattttaaatgtatgtctaaccaacattaatattatatcaagtttatgttacattgttctatatgtataatttgtcacaccccaatataattttaattattagaaagctttatagctaatttaaacataacatttgtaatgttcatgatttgttttacatactaggcaagggaaactgcttaataacagaataaatgactgattgtccaatttagggactagacaagaggctgtagtagatgccctgaagtaacattgcctagtaagaggaataaaacaagtagacagattttgaaagcatcataactggaggagggttgtgaaaggtttcatgagcaaagatgatcctttcaaaggtcatttaatggcaatgctgtgaaaagacagtggccaaggcatccattctcaatgcagaagatttactaagatcacgggccctggagccagactgtccacgttcagatctgccacttaagagctgagtgatcttgggaagttatatatcctttgagtcttaattccccatttcaacagtgtcattctcttttcctataggaaatctaaggatatagtcaacaaaatgacttttcacagtcaaaaattttgtgctgattctgatggcttctcacaggaactcagaaattttaaccaagaaggtacaaaattggttgaagaatctgtgaaacactctgataaactcaatggcaacctggaaaaaatatctcaagagactgaacagagatgtgaatctctgaacacaagaacagtttatttttctgaacagtgggtatcttccttaaatgaaagggaacaggaacttcacaacttattggaggtaataactttgtaagtggaacttactttggggagaataataatcagaaagttaaatattcttggctaagaatagatttcaaaacaaatgatattttaagctataatgacttaaacttttaagtataatatttggtatgcttacagatgatctcgttttgtgctttgttatatgtcttctcaatcttggaattaatttaacatttgtacagtttctttcctgtatttatccttggtttctgacttagtagtttcttcaaagaagggcaccctgtcttttgatatgtaataccttccacttatatatgctttttttttttttttttttgagatggagtctcactctgttgcccaggctggagtgcaatggcacgatctcagctcactgcaacctccgcctcccaagttcaagcgattctcctgcctcagcctctcgagtagttgggattataggcacctgccaccacacccggctaatttttttgtatttttagtagagatggggtttcactatattggccaggctggtgtcaaactcctgacctcatgatccacccgcctcggcctcccaaagtgctgggattacaggcatgagccactgcgcccggcctatctttgctttttacttttctccaagtacattcaaacctattattattttaagtatttaggttattgttctggtaactaaaggatacttgataggtttatggatttgcttgaacttaacgcttgcatgagccctttgtaacttggttttttctttctttgcattaataggattttactaacattctcaggaagtaggtacaaagaattaaaatttttaatctatataagctgttttcactaaaaggaactagagtttgtatacaaatagctaatttcagatttgtgataggaaatgtataatatatgagcctagagatcttgtcataccagagagtaaggaagctgttaaagatttctgaggttgtcaaaaggtcttagtagccaacctccccatcttcaaaggtggcataatttgagcatcaaaaagaataatggccataatggattaaaacatatcaaatatattaaaacttacgaactcataaaaatttcataggtctcctttggatcatgctagggaagcaacacattgtcctgaaaatgggtaaagaagaagaaaaaatttagcatccatctgtctttcctaaaagaaccatatcttggtttagcagggtaatgaagaaaagtgtttcattagactctaagctaataaaatggagaagaaatgatagaattaatatatcaccagtatgcaactcttaataaaataacccctgtggatgttaatgatggcttaaaccatttgatcaaaagctgttggggaactttataattaataggctaaccatacctgaactcactgataaatcttaacatgagagacacagcaaagcattttgtgcttgcagtactacctatgaaatactcttgctaaaaaattaaacctgaattaaatcaagcctttaggtctaaccagtttgtagaaaataaagcatagaaatgcagttgaccaaatccagaatttgagatgttcaatggggtaaagacctcatgtcttcagcaacaagttttttttttcaagggaaaaaatatgagaaacaataacctgtatatcaaaagagacttaagactagaggtccttaagtcttagtttgcctgagacagtccttgttgatattgttgtattagaatgattattaagaatgggccctttcactccaaaaggtgtcccaatttggatgataaattatatagtcaccgacttaagacctatgaaccaaatctagtggtgaattctggttcaaacaaagcaattgtgacacacatttgagacgactggtgaagtttgaacatggactagacatttgataggaaggaatcagtgttaacctttttagatgtgatagtggtcttaaagtgctcttacctcttagagatacatgctgaagtaaatggatgaaatgatacaggatttgtttcaaaataatcctgggtttatggaggagttgagtggccagtcctgttggtaaatgtctgtactccacttgttggtaaatgttgaagctgggtaatgaatacaagggagttaattatactgttctctctacttttgtatgtgtttttaaatcttttattactgaaggccaggtgtggtggctcatgcctgtaatctttggaggtcaaggtgggcagattgcttgagcccaggagtttgagaccagcttgggcaacatggtgaaatgccatctcttcaaaaaatacaaaaattagccaggcatggtggtacatgcctgtagtcccagctacctgggaggctgaggtgggaggatggcttgagcctgggaggtcaaggctgtagtgagcactactcatgccactgcactccagcctgggcaacagagtgagacttgtctccaaaaaaaaaaaaaattatggaaaaggtaagggaaaatatgatgttgaataaaacactggcaactttaattttagtaataaatatttatttgcatcatttacaggttgtaagccaatgttgtgaggcttcaagttcagacatcactgagaaatcagatggacgtaaggcagctcatgagaaacagcataacatttttcttgatcagatgactattgatgaagataaattgatagcacaaaatctagaacttaatgaaaccataaaaattggtttgactaagcttaattgctttctggaacaggatctgaaactggatatcccaacaggtactttaaaagagaaatagaattgttaaattttttgaagtcgaattcaactctatgtagtgtcagatgttcagaaaaattaggtcctgccattgcctgacagaaatttaacatctcactgtaatcaactcaaaatgggaaaactggaaccttaaaatagttttaatcaagtgtcatgatacaggtggtatcacaattcagtataatttcacatactttcagggagttgactttgttaataggggattttttaaaacaaatacaaacctagcactgtttgtaaaaggacattttaataccacaaatatgggagagatgtaactgactaaatctagtttaatgcaaagtttaccacattgtgcattttgttctgtgtccctctcattttgtcatagactattgccatttaggaatccctgttttaagagatcagggatcaccatggaccattagcatttaggaatcaacattttgagagatcacatatggcaaagatcattataggctgtaatgattcagggaggtcttcatggaagagatgtaacaagctgttttacacagcatgaataattgggttcttcattggattatggtaatggttgcacaccctgtaaactcactaaaatccactgaattgtacacataaaatgagtgttttatggtatgtaaattatatcacaaaactcttttttttttttaatttaaaaagcaattgttaaaaggggatggtgctacatagaatgttggtttatttattccccaagagacctgtaggatttactgtctacttttcaatgaagttaggaatgtaaatgttgagtgaaaaggcaagtacttttgtaaatcatgagagcatgagcttattacagagaaatataactgggggcctgatgcggtggctcacacctataatcccagcacttcgggaggcaaggcaggaggatcgtttgagcccaggggttcaagaccagcctgggcaacatagtatatgtatataactagttaatatttaaccaccacaccacatttatagtgaaatgattactcctatcaaagtaatcatgttgggaaatctactcattccaataatgctgccatttttttcagaacactataactccttttagagcttataacacatcttttatatatcctcagagatggtaaacttcatgttttagagagtaggatgaatcttgaaaacagtaaagtctgtcatcaaattagaaagtattgttagttgcaaacaatgtctgacaggtagcaagactgatcctcatatatggcaattatatttttatatttttagaagacaagattaattaggaagttttaggtttttttaaaaatatttacatctcatactttaatttttacctcttatctaatgtccgttaaaggtacgacaccacagaggaaaagttatttatacccatcaacactggtaagaactgaaccacgtgaacatctccttgatcagctgaaaaggaaacagcctgagctgttaatgatgctaaactgttcagaaaacaacaaagaagagacaattccggtaaatttaaaggatcatattttataatagaactcttttatgaactcttgatgtggctgacttcatgtgaagaattttactgtttacccctcaatcttaccccgcctctcattaatgataggcctagcccttaggcttgtttcttttaatcttactagtttttaaattatgctagtagataataatagccaatacttaatattgtgcttagtaacattgttatataggaacctctactctctataaaaatatattaggaattattttcattaatttgtagactttctaataattttgttgaggtttaacttttatattataccatgggcattgtgttatactcaaagctgctgttactcttgtgatgacttttaagcccttggacttagtcactcatccagtttcttcttttaggatgtggatgtagaagaggcagttctggggcagtatactgaagaacctctaagtcaagagccatctgtagatgctggtgtggattgttcatcaattggcggggttccatttttccaggtatgtcatatcagataacccttccacatctgatgtaagtcattcatttactattcattataaaggtattgttcgtggtgagcagaacaacaaaaacctttcaattattccttaggatggcttgttaacgcttatgatttgaattatttacaaaaatctgatattgataaggggttttctgtagaataaatgaaggcagaatttgacttaatctacatccttagctgataatctttagctattgtatttattccttttctgcttgctatatactcagacactgagagcagtcatttctcttccttctacctttgacatgtaagtcttggaacctatctctgcccataatcagactttgaaggcaaagtgattgaaaagattgagagactggaggcctcttaggttatattagtgatttctcctgcctgaggctcttctcttgtaaactgttgccccatgtttcctgagcaccttgcctgctctaatccagtgtaattaaatcctgtgacctctcctacccactcttcttttttttttgagactgagtcacccaggctgaagtggagtggcacgatcttggctcacttaacctccgcctcctgagttcaagtgattctcctgactcagcctcccgggtagctaggattacaggcatgcaccaccacacctggctaatttttttgtatttttagtagagacagggtttcactatgtgggccaggctggtctcaaactcctgacctcaagttatctaccctcctcggcctcccaaagtgctgggattacaggcgtgagccactgtgcccagccctctacccacttttttttttcttttgagacggagcttcgctcttgtttcccaggctggagtgcaatggcacgatcttggctcaccgcaacttccacctcctgggttcaagtgattctcctgcctcagcctcccgagtagccaggattacaggcatgtgccaccatgcctggctaattttgtttttttttttttttttttttttttttttttttttttttttagtagagggggtttctctgtgttggtcaggctggtctcgaactcccaacttcaggtgatctgcctgcctcggcctcccgtagtgctgggattacaggtgtgagccaccggcccggcccctcctacccactttttaacactgttgagaacatagttggtttatgattcatctcagcattgatgactgagtacacaatcaatgtcaccagtcccttaatgttctctatgggtaagtaggaggattccaatgaaatacaacttccaagtgaggctctataaagtgctggtatcttttcctctaatttgagggtacaagcctagacagagtgtgtgaaggaaaaatttccttacgtaggacattggtatctacatttacagttgaagttctacttctgagatgcatatgcttgtaccttttttttttttttttttttttaaatatatatagagagagggtcttgctatgttggccagactggtcttgaactcttggcctcaagcagccctcctacctcagcctcccaaaatgctaggattacaggcatgaaccactgcgcctggctgcttgtaccttttttgtgtgtatgtcttgttttgtttttttgtttttgagacggagttttgctcttgttgcccaggccagagtgcaattgcctgatcttggctcaccacaatctccgcctcccgggttctagcgattctcttgcctcatcctcccgagtagctgggattacaggcatgcaccaccacacctggctaatattgtatttttagtagagaaggggtttctccatgttggtcaggctaatcttgaactcccgacctcaggtgatccgcccgcctcggcctcccaaagtgctgggattacaagcgtgagccaccgcgctcggcctgtaactgttttttaatagatctacagctccttcccttaaggtctaaagattctccatccctgctttcaacagttaacaaagttccaactcagattctcataaattcctccctgtcttcctctgggcaattttattcccaaattcttgccaccttttgctttattccttactattagagaactataaatatgtttctttcagttttcatccttttcttctatcttataaagttaggaaagggggaaggataagagaacctggtgactacttaatccctggtcagaaatcgttttattattattatctgtggcattttgaattaggcttagtgattcagctatggcaaggaagtccctacagtaccagaaagggtttgggatggggttttagaccttcagctgaagtccagaaatgatcttttccctagtagcagtgtgatgtggggattttctctgcgtttaaaactttaaaagttggtttacaatttgtctcagcattgatgactgagtgtacaatgaatgtcaccagtccattaatgttctgtatgggtaagtaggattccaatgaaatagaacttccaaatgaggaatatgaaataggttttacaaataaaataaaatacaattttaaaaaacaagtaaaagtgtttttaaggtggcccatataccagtttctctgcttaaaacagaattggcttttctgcatgacagcaaatctttgtttccttagagcagggtttcttgacagcagtgctattggcattttaaactggataattctttgttgtgatgggctttcctgtggactgtactatgttggtacacaagaaaaacagtgtactatgtgaatactcactcaaagccagtagcactccctgattgtaacaccaaaaaagtctctcagcattgccaaatgtcccctgtggcagcagaatcactccctgatgagaaccactaccctggagtaaaatctataactatgtcttagaaaataacacagaaaattaatatttctttcactctactccttccattagtgatcaaataaagaaggcatttggcgctacttgccaaattgttggctcaaacttgtgctgaaccttttttggttttctacacttaagtttttttgcctataacccagagaactttgaaaatagagtgtagttaatgtgtatctaatgttactttgtattgacttaattttcccgccttaaatccacagcataaaaaatcacatggaaaagacaaagaaaacagaggcattaacacactggagaggtctaaagtggaagaaactacagagcacttggttacaaagagcagattacctctgcgagcccagatcaacctttaattcacttgggggttggcaattttatttttaaagaaaacttaaaaataaaacctgaaaccccagaacttgagccttgtgtatagattttaaaagaatatatatatcagccgggcgcggtggctcatgcctgtaatcccagcactttgggaggctgaggcgggtggattgcttgagcccaggagtttgagaccagcctggccaacgtggcaaaacctcgtctctgttaaaaattagccgggcgtggtggcacactcctgtaatcccagctactggggaggctgaggcacgagaatcacttgaacccaggaagcggggttgcagtgagccaaaggtacaccactacactccagcctgggcaacagagcaagactcggtctcaaaaacaaaatttaaaaaagatataaggcagtactgtaaattcagttgaattttgatatctacccatttttctgtcatccctatagttcactttgtattaaattgggtttcatttgggatttgcaatgtaaatacgtatttctagttttcatataaagtagttcttttataacaaatgaaaagtatttttcttgtatattattaagtaatgaatatataagaactgtactcttctcagcttgagcttacataggtaaatatcaccaacatctgtccttagaaaggaccatctcatgttttttttcttgctatgacttgtgtattttcttgcatcctccctagacttccctatttcgctttctcctcggctcactttctccctttttatttttcaccaaaccatttgtagagctacaaaaggtatcctttcttattttcagtagtcagaattttatctagaaatcttttaacacctttttagtggttatttctaaaatcactgtcaacaataaatctaaccctagttgtatccctcctttcagtatttttcacttgttgccccaaatgtgaaagcatttcattcctttaagaggcctaactcattcaccctgacagagttcacaaaaagcccacttaagagtatacattgctattatgggagaccacccagacatctgactaatggctctgtgcccacactccaagacctgtgccttttagagaagctcacaatgatttaaggactgtttgaaacttccaattatgtctataatttatattcttttgtttacatgatgaaactttttgttgttgcttgtttgtatataatacaatgtgtacatgtatctttttctcgattcaaatcttaacccttaggactctggtatttttgatctggcaaccatatttctggaagttgagatgtttcagcttgaagaaccaaaacagaaggaatatgtacaaagaataaattttctgctcacgatgagtttagtgtgtaaagtttagagacatctgactttgatagctaaattaaaccaaaccctattgaagaattgaatatatgctacttcaagaaactaaattgatctcgtagaattatcttaataaaataatggctataatttctctgcaaaatcagatgtcagcataagcgatggataatacctaataaactgccctcagtaaatccatggttaataaatgtggtttctacattaa

SEQ ID NO: 18 - DNA, 122729 bp, Homo sapiens
gttagtcccttgcggtgatccgtcctttcatcctggcgtttgcctgcagcaagatggcggcggtgtcaatgtcagtggtactgaggcagacgttgtggcggagaagggcagtggctgtagctgccctttccgtttccagggttccgaccaggtaatagaattttcacacttttcttcaagcttcttgggtccctccatttttgcggagtctctgctggctgagttccggaggaggcctcggggaaggcgtcctctgttgacccttttctcgggagaagtcgggcggactagggactgtctgctatcaatgggcgttggccaggcgagtgagggcgtgagtgcgaggccggggaggaggacctgtggttttctggaagctttcgtattcggcttgtcgctgagggagagggtccgtggaggttttgcctccggagctgcaagctgaaccttagccctcagagaaggggaggagtctcactgatttctgtttccactttctgcatcccttccatttgtcacctgtttgcccaccactccagtccttacagaagggttaaatcactgtatcccttccatggttttaagtggttttaatttggtttctgcataggaagattgtttattcatcagtctgcttgggaggaaaacttgtttggaattcagtgttagtaaaaatatcactgctagtaatattggaaggtaatttttaaaaggctggtggtaatgcctggaggttttctagggattttgttaaagcctcacaataattcagggattgaattgagttgttgagggctctttgcgtccttgagaacctaaagtagtacttttccaaagtattgtcagattcagttgtcagttgattgagttgttactgtttttccttgaagcatttttgtgatgatttttttttttttggctgtattaaccttccattttctatttttcagaatttcctggagttttttaaattatagtactaatgctatacgtacatacacacacatattagaacaaagattggaaagactggatggagagatttgaagggggtaggaggtggatgcaagtggttaaaagttgaaaggaaggtctagtagaatgctaattgatttagtgttaaatataaatggaatgcagagaattaggatgagttaattcggaagaatttttaaggatgagttttattaaggtttaaatatagtgggtgttgggtgggaaagaagagagtgtcccgtagggtccgtggcttatgaaaaggcttgaaagcattagttaaacgattactaaatacatagaatagagtcactcaaaagtaagggtgctaagattggggaaaggcaaatgatgtttgtaattaagtgttccatatatggaaagtatttttcctttttctttctctttttttttttgagatacattctcactctgacgcccaggctgtagtgcaatggcgtgatcttggttcactgcaacctccgcctcccgggttcaagcagttctcctgccgcagcctcctgactagctgggattacaggcgcgcaccaccacacctggctaatttttgtatttttagtagaggcggggtttcaccatgttggtcaggctgggttaagtatttttctaaggtaaaatacttcactggttaacttagagttaatatagcggtgaccaagattagcccttcctcccgtacagattatagggattaattgtcattcccagataataatgtactcatggtagccccagaactgaaaacaagtttgaagggaccactggtttatggctaatcaaaacatggctgtaattttaagtcaaagccattttgtcagcaattatagtaattgaagttgagattagatttttgaaactctgatgataattgttactacatatccaaacttaagagtttttgcctgcaaatgtaagagatttgaaaataaatcatttaatcttgaaaaaaaatcttaatgccagggaagacgttttttaaatacaaattaacacatttatttgttttctgtgccacatttttaccctaagagcttgtcatgttcatcctaatttgagggaaatttatagaccctctcccttacatattgtttgttcttcatccttaagcattctttttccattatgatttgatagtaatgaggatctgaaaaaggtgagtagaaagaaccaattaatgggaaaatctacatctaaaattcattttattgtaatgcttagaaaaacatttgcaaatcatgtaacatttcagatcatttgaatagaatatgggaagtggaatcagtaaggtaaggagtggagtagggaactgaaggaaaggaagggccgggcgcggtggctcacacctgtaatcccagcactttgggaggccgaggcgggcagatcacaaggtcaggagatcgagaccatcctggccaacacggtgaaaccccgtctctactaaaaatacaaaaaattagccaggcgtggcagcgtgcgcctgtagtcccagctactcaggaggctgaggcaggaggatggcgtgaacccgggaggcagagcttgcagtgagtcaagatcgcgccactgcactccagcctgggcaacagagccagactgtgtctcaaaaaaacaaaaaaaaaaaaaaaaaagaaaaggaaggatgctgttagctgctacattaacatattaattcaattatagtatatcatcagtgaaaagcaaaacaaagaatgcaacaacacatacacacaagagagaaaaaatctagtaatgtgggtgattgagctgatctagttacttactgagcttgtgctgtagtgttggtctcagtttccatgtgcttctcatttccctgtaccgaatgtgaggaggcaaaaaaaggggttaaattgtctacattttttttttttttggagatgtagtttcgctcttgtcacccattctagagtgcagtggcacaatctcagttcactgcaacctctgcctcccgggttcaagcgattctcccgccccagcctccagagtagctgggattacaggtgcccaccacctcgcccagctaatttttttatttttagtagagatggagtttcaccgtgttagccaggctggtctcaaactcctacccacaggtgatccacccgccccggcctcccaaagtgctgggatgacaggcgggagccaccgcgcccatccctaagttgtctacatttatccttactttccctgactttcctaagagattttccagggtaaatttaactattctaaatgcatttatcagccagatgaaatggcactctatttcaaaatagctatacttaagatatttgatgcagtgatgtttttattcacttatttaagtgtgttcatgtatacttatctcaccttagtatttactaggtcttgtgttttcctcaaacaagtccttagggtgttaaatcacccagagggttttaattaatgactggtggggactgagtgtttgggacctgtttgtgaggtctcttttatgccctgatctgtggctttattctgttgctgtgtttggttcttcagcattatataagctagcatgaaattgagtcttcaattcgatggggaattgaatttgaaccctccaaatagtaagcagtccttaaggttgacaagaattctgtttgttaacaccttgctgggaaataggctaagctcaaatttaggacacttaagaccaataggttcacttctacttcagataaactaaataaattcctctcctaggggcagctatttttgctatctttgtaacacatccaagccaaagtttgagagcttgaaagatttctaatatgttttctgataggtttatttgttttgtttcttttcctctttccaaatgcccatacttagttttcatcagtagcagacatcttcgttgaatttttgttaggaaaataattattatattttgagacagagtctcattctgttgctcaggctggagtgcagtggcgcaatcttggctcatgcaacctccaccctctgggctcaggtgatcctcctgccttagtcttcacaggcagctgggactgtaggtgtgcttgccaccacgcccagctaatttttgtattttcagtacagacggggtttcacactggtcttgaacacctgaccccaagtgatccgtgtgccttggcctcccaaagtgttaggattacaggcatgagccaccgtatccagccggaaaattaaatattttaatatgtaatgtcggcatatagtaagccttccctagataaatggtaattttattattggtttgaatggcctgaatgtttttcatttctttaatcttggttgtaagtattgtgatagattgtgttattgtttaaagtattcactaccactgtctgcaacaggattacatatccaaaaaccactggccaaatgacttgctttatccagtgaaatgttagtggaaatgatataccatgtcaaacaggagctttgagagctctcctgtgttttgtcatattccttttccctctgatgtgaggtaggtgtactccaggtggggtctgctgttttagcccacatcttggattgtagactacatagtgcaaagcagaaactgattcttattgcaagattttataaaatataaattgagtgaaaaataaacctttgctgtaagccacaaaggtgtttggattggttacctcagcataacaacctatgctgactctattttatatacactcatatttgcaagtgagcaggttttagcacatggaccgatatatcagcagtgaggtcgcaagctttttgaggacacaaccacatttttgtttatttgtgtgtacttcatggcatctagtgtaatggcttgcatgtagcaggtaaatgcttatcttacagatgaataaatacatatttagagatgagcgattgtgaggaaaagcagggagcattacgcagtgtttcttttaataccctcatcagtgatagccaggtaggcactaacctttataaatatgaagataaactatctacaacacatattctaattatttgcagtggtctgagtgtaggatattcacctagaactctgttaacttttggattgaagttgtcttatgaatagattttgtattcatacactttgacaagtgttcagacacttcttttgtattcaaatttaaaaatgcaagaggaaatgaatgtttgggaaagggtacccttggaacatgagaacttttttggagtaagagtaactatgcgaagttttaaaaagtcagtaatacggccgggtgcggtggctcacgcctgtaatcccagcattttgggaggccaaggcgggtggatcatgaggtcaggagttcgagaccagcctggccaacatggtgaaaccccgtctccactaaaaaatacaataattagccgggtgcggtggcgggtgcctgtaatcccagctactcgggaggccgaggcaggagaatcgcttgaacctgggaggcggaggttgcagtgagccgagatcgcaccactgcactctagcctgggtgacagggcaagactccaaaaaaaagttaataatacacggaacttaagggagaaagatggagcaacttggttcctgtataatacttgctagaagagatctgtttggggtgaggtatacatagaatttagtcagaatacatattgtctgtactgaatacaaacaatttcaaatggaagagcttctaaaacatgtcccttggtagaagttgagaatcgtttattccaagcaaaattaattccaagtagcatttgtttttaatttactctgtatcagctactgtgccaaggatttcacctgtattatctcatgtgtttcccacagtaatcctatcaactcaggtgttgttatcctcatttttcagatgaggaaacaggtacagaagtgaaattactgaagtttacattgccaggaaatgtaattgtctcttggtatccatgaaagattggttccaggactcctcaaggacaccaaaatccacggatgctcaagtccttgatttaagatggtgtagtatttccatataacttctgtacatcctcctatatactttaaatcatctctggattacttatgatacctaatacaatgtaaattctctgtaaataactgttatcctgtattctttaggaaataatgaaaagaaaaaagactgtacatgataagtacagatgcagtttttcctcccccaccgccaagtatttttttttttttttttgaggtggagtcttgctttgttgcccaggctgaaatgcagtggcgtgatctcggctcactgtgaactctgcctcccaggttcaagcaattctcctgcctcagcctcccgagtagctgggattacaggcgcgcaccaccacgcctggataatttctttgtattttaattagagacggggtttcaccatgttggtcaggctggtctcaaactcctgacctcgtgatccacctgcctcgacctcccaaagtgctggaattacaggcgtgagccactgagcccagcaccccttaatattttaaatctgaggttggttgaattatgatgtggaacccacagatgcagagggttgactgtagtctgatatagcagtctaaatgaatatgttcacttttgcagtgaggaatattatgtctggtaataatcagttcaaaccctaatgtcctctctgttttttctgccttttagccaagtgtcttctttatttgagagaccatggaatgctcttatctttactgttgctgcatggttccatttgtacagtgagagttaccaaatgcacaattagttgtttacttttttaagctaatgattttttcccctaaattttgtaattatttttggtaagggacttttcataggtgacttattatacttttttacgctcttaaaaaatatatataacaagatatactggacattttttttttctgttttcttactgattccagtgattaggaaaaacggttgtattgtgttgtctttaaaaacgattcagtgtctgctatgctttctgagttctcgtgtctgctttttaatagtgttatattcttccttgactggtctgcttccctttagcagttttagcacccctttttcatttattatggatttgaatgtcaagcaactaaacctattagaattttgtataaaacaaagtatgctaaatgaaattctgatgatggcagaagtttactttttatgattaaagacttgagctcttttaaggttaacgaataattatatttaatatatgagctcttgtgacttttcttttctagcttgtagaagtccatagatcctgatggaacctttttgaacctgaattatgcagtgaccacattcttcataacaactttcatctaaacatatgaataatttaataaactattataaattttttcttttaataacagagcaattcagaattcttgtttcaagttctattttgttgtctgttactaagtattttggtaggtaaatatgactttaggttctttagaactagttagttgctcaaaggtaaccttttcttcttgtctgtactcactagacttaatttttcttttatgggctcattctccagttcactggtttttaaacccttgtgcatcaaaattatctgttgggtgcctaaaaaattcagatgccttgccccccagtctatattggttcagtaagtttaggttgaggcttagctctatggtgattctaatgggaagctagggctgaaaacggattaaaaaaaaagtttccatattatatcttgtaagacttaggaaatatatttttccttgggagagagttcagggagatttccagaaacaaaaattcttccatttttgcatatttttctattctaaattaagttttatgcttttcacccatgcacataagaggtattttcttggggaaagtttccttagagggaaaaaaggcattttgataattttggagaaagcaggccatattactctctctctagagactcttattcttccttttggaagggctcaggtttaatatagcacagctgttgaactctgcccttcaaaattttaagaaagtgttttatcctttaaaatggaaaaggcttttttaggaaggtggtctttcactggatgtagttctctaagaaagtttcatgcttctctactcttttgtgtttgaatcgtttcaaatgttgagagaactgtctctgggagtaaaatctggctgcttttgcaatatattttctgtattcttaaacaaagctatatgaagagtttatttctttgtgttttctaggactcaaaaatatgttttttcctttattcagccacttcacacataagtaaatggtccttgaatagggcttactggacaaaagattctgttctagatgactgttcagcaagccatatgcttctcctaaaaatgtcagtctgtcttgatgagctttaaagtgaatacagatgttttggctcttttgaggactaccactctttgtatggaaagagtacttctttttcaagtgatctcttcaatatacttacaggaatttgcatgaaatttatgacttttgccttttaagtctaataagattagacttagacatgtgtaatttgaatttaattttaatattcgtagtacaaatgagatttggggaataaaatacatttcataatatggctttttgttcagattttgtattcaaccttttaaaaaatgtgaaagtgctttgtaatatttacttttgtgcaataaaaagtgatattttggcaggcaaggttacctttttagatgttcagtgtcttctatctttgtaggttaactctggagttatagttcatagatttatgtaatatttaagttggaagaaaactctagaatcattaagtccaaccctttatttaatgcaagaatccctagaacttcctgcttcttgattatctagttgttgaggaagtttggtgactttctgataaccccagaaaacacactatacgtttagacttactggtaagtgatgtttttctttgaaactgtatagaacaagtttaaccccgtatacacttgtcagcccttcagataattgaagacatttgtcatcactcattcttccttcaagtctgtgctccaggcttagcacgtccagtttgtttactctttattaatgatcaaatttcctgacgctttactacctcttggtaccccttaggatgttttccattttgtcagtgttgatctttgaactatgtactgtacttttatttaaatgagattatcagagatgatagtttcatgagctgagattgaattaaggaaaaaagttgactctaggttggatttattttatattatttttaaaattataaagaaaaattaactgttttccttttggtgtatacttcttagagttttaacacatgtatgggttatgtgtaaccaccaccataatcctagtacagaatacagtgtaatatgcagataactgttttactgtattgtttcagggtgcagaataccaaaagacttcattaccccaagactccctcatgttatccttccctgaccgctgtaatccctgtccacagttatcttttttcatctttatagttttacagttttgagactgtaatataaatgtagtcatatataaccttttgagattgtctttttttattcagcctggtgcctttgaacttcatataagtttcatgtatcgacagtttgttcctttttactgctaagtagtattccgttatgtggaggtaccacagtttatccatttacctattgaaggacatatgaattatttcaggtttttggcagtgtaaatagagcttctgtacaggattttatgtgaattatgattttgtttctctagagtaaatacctgggtagaagattcctgggtcatagctaagtgtatgtttaattttataagaaactctcagaccgttttccagagtggttgtaccattttgcttttcaccagcaccatatgaaagttttagttgttttgcatccttgttaacatttgtattgtatttttttttctttttttttttttttttgagacagagtcttgctctgtcacccaggctggagtgcagtggcacgatcttggctcactgcaagctccgcctcccaggttcaagtgattgtcctgcctcagcctcctgagtagctggtattacaggtgcatgccaccatgcccggctaatttttgtatttttagtagagacggagtttcaccatgttggtcaggctagtctcgaactcctgaccttaggtgatctgcctgcctcggcctcccaaagcgctggaattacaggcatgagccacggcgcccggctgtgttttttattttagccattctagtaggtgtttaatggtatttcattacggatttttattttggaatggctttatttagctataatttatatattataaaatttactcatataaagtatacaatttgactggttttcatatattcccagaattgtacaaccaaaaccacaattttagaacatttccatcactcaaactctgtacccattagcagtcgcttctcccccagtcctagataacgactaaccttctttttgtttctacagatttgcctattctggacattttatacaaatgcagtcatataatatatggtcttttgtgacaggcttgtttcagttagcataatgttttcaaggtttatccaagttgtagcatgtaccagtactttattcctttttattgaagaatagtattctattgtatggacaaaccacattttatttttgagggacatctggattgtttctaccttttggctacatgaatagtgttctgtggacattcagatacaatattttatgtcaacatatgtttttattgttttgggtatatacctcggagtagaattgcaggataatgtaataactctatatttagccttttgagtaactgtcagactgttttccaaagtggctgcactattttacattcccaccagcagtgaatgagggttccagtgtctttgtatcctctccaactttgttattatctatctttttgaagttataactatcctagtgagtataaggtggtacctcattctggttttgacttgtacttctatgatggctaactcattgtggttttaatatgcatttctctaatggcaaatgatgttgaactttggtgaagtatctgtttatgtcttttgcccatttttaatcatgttattttcttattgttcagcttttatagttcctaaaatattctggatacaaattctttgtcatgtatgggaaaaaatatatctctctaggttcatggttgagccccctacaactaaagacagatgaagaagagaaaagcatacacatgtatttaatataaatttgtgtaacatgggagctttcataaggagataaatatccaaagaaacagttaaacttgtatatttttatgcttaggtttggtgaagagtagatagggagaaatatgatagaacaaaggggatttggtatatggtaataagctgggggaaacagcaaagccagtttgttctgattcgtctctgactgaccatttgtcttcagagataacaatgttcctttctttctgatatagggaagacacctctcacatgagagttttatagggaaggttagataatcctagattttataacctacttcagagaagaagggatgggggaagaaggtcaaaggtaccttcctacttcggccgtttttcagtattacaaggtggcacattttggggtagcatgtcctgaactctaccaatcagatgtgtaattttcaaatattttcttctaatctgtagtttttctttttcattctttaacattatctttcacaaagtaaaagttttaaattttgatgaagttagtttactagtatttttccttttaatgattgtgctttcgttgttgagctctttgcctaaccccaggctgtgaagatttttttctgtattgtcttcttgaagttttttttttttttggcggagtctcgccctgttgcccaggctggagtgcagtggcgcaatcttggcttactgcaacctctgcctcctgggttcaagtggattctcctgcctcagcctcccaagtagctgggattacaggcatgtgccaccatgcctggctaagtttttgtatctttagtagagacggggtttcaccatgttggccaggctggtctcgaactcccgacctcgtgatccacctgccttggcctcccaaagtgctgggattagaggcgtgagctaccgtgcctggcctttgttgttttttgttttttttttttgtttttttttttttttaagagaccaggtcttgctctgttactcaggctatagggtagtggtatgataatggcttactgcagccttgacttcccggactctagcgattctttcccacctcagcctcctgagtagccaagactacaggtgcataccaccatgcctcgctaatttttatattttttttgtagacatgggtgtctccctgtgttgcccaggctggtcttgaactcctgggttcaagcagtcctcctgcctaggctccccaaagtactgggattacaggtgtgagccactgcacctggcccatccttctttttgaaaattgtagctattttagttcccttccatcatttagaatcagctcttttataactatgaaatcctgctagggttttgattgtattgcattaaatctatagattaatttgggaaaagttgacatttctgctgtgttgaatctttcaatccataaacatggtatgtctctttatttatttatctaatcagtgttgtagttttgagcgtgcagatcctgtatatgtttcgttagatttatgcctaactatctcaatttgggggagctgtggtaaagagcattgcttttaaaattttcttttctttattttttattttttagagacagggccttgctctgtcatccaggctggagtgcagtggtgcaatcatagctcactacatccctgagctcctgggcttaagcagtcctcccacctcagcctcccaggcagctgcgactataggcatgtaccactaagcttgactaattttcttattttatttttttgtagagacaggttgctatattgcccatgcttgtctcaaactcctgacctcaggtgatcctccttcctcggcctcccagaatgctaggattatagacatgagttattgcatccagcctaaattttattttgaaattgtatattgctgtatatagaagtgtgattgatttttgtggttgactttgtatcctgtgaccttgccacatttatttgttacataaagttatataagttttttgtagattctttgggctttctaagaaaataatcatgcagtccgtgaatagggaaattttgtttcttcctttccaatcactaggtcttttatttctttttcatttccaggaggatgttaagaatggtaacagcagacattcttttcatttaccaatcttaagggaaagcattcagtttttcacctttacgtataatgttagctaaaggttttttgtagaaataccctttattagattgaggaggttcccttctgcttctgctttgctaacagttttcatcaagaatggatgtgtctaatgccttttatgcatcaattggtgtagtcttgtttttcttctttagactgttaatgtggtagattgattttcaaatattgaatcagcttgcattctcaataaaccccacttagttgtggtgttgaattcttttcgtatactggcatatttggtttcctaatactttgttgaagatttttacatctgtgtttatgaagaatactgatctgtagtttgtttcttttttattttggtactgtgtttagatttggtatcagggtaatgctggactcataaaatgagctgggaaatttttcatcatcttttcttttgaattgctttagtttcatgctacaaattaagatatgttgtattttcatttggttcaaaatattttatttcccttgagacttcctttttgatctgtaaattatttagaggtgttttgtttaatttccatgtatttggatgctttcttttttttgttatttattttttgtttatattatattcggagaacccaattccctggggtttcctttatcaatgtccatccagaaaattgtggctatcattaagttgcactgtagttgcacctaaatcagggactaagggactagaggacagagagagaaaaaaacagaaaagcaatgggtgttggccccaccttttcagaaccacagctccagcggacttagaagaagaaccctccttcagatttttggctcccgcacatttccattgttgccaccgcatgtggctataggattgcctatggctgattcatggtgtatgagagaaaagagaagaaaatggggattttctatcatttctctgagcacttgtttcttttcttgctccttgaggccgagtgcttctggagaattgctcatttcatgtttccagccgcatttaagttcaggctggggacattcaagggaaaagctatttcagactcactgctagttcagtggtcctttgagttctgatgatcttccctgatctgcctgctatttccttttcagagccttcaaacagctgctccatgcatcctttccagatttcatggttgcattcagtgggagatacagggtacagtgtgcttgctacatcttactcaggacaagcccatcctaggatggattatttttaaagctaaacgctaacatttcttgcatcttagcacatctgaatggatttaaaggatctaaaatgactcaaaatattctttatatgatcagattcttttttttttttttttttttttttttttgcagacagagtcttgctctgtcgcctaggctggagtgcagtggcatgatctcggctcactgcaacctctgcctcccgggttaaatcgattcatgtgcctcagcctcccgagtagctggaattgcaggtgtgcaccaccatgtctggctaatttttgtatttttgtagagatgggggtttcaccatgatggccaggctggtttcaaactcctggcctgaagtgatctgcctgcctctgtctcccaaagtgctgggattacaggtgttagctaccacacctggcctaaatgatcagattcttaaccagttgattctcaactgtggtgggagaaagggaggaattcacataccataatcttggaaatggcataaagaaagggtttcacaatacatgtacttgtggttgaaaatcatgacttttatttaaagatgttgcccatgtaagtgatgcagaggcaggaaaatacattgaatcactggtttagaccatcaaacaataaatcttctttgagagggtgtagaggtcagagatctatttagagtaaatgatggaagttttggtgacttttctctagaaatagatacagtcatatgtataaaatcagagtgggggattaatggatcccaggctttgtagcccttccatagatagtattaggtcttatacagtgttttgtttatactcgtgttcaagttcttgtgttaaacctttctcacaagttacagaaacctaaaatctcagatggctggcttaggcaagaagagagaattggtttacattaccaagcaatggaaagggtaagggtgcacctagctagtctcagggacctaagctagaaagccaccaggttctttttctagtttgtctctgtctgtctctgaatgacagctactatttcagattgtttttttcccatgtggtagatactataactgatagaaatttcttcaggtttatatctccatagctttattaccagggagggactgaaaatccctttctctgataccaagtttaaaaatcctggagaaatacttgatttgagtcagattaaacacactaagggtttacaaaaaatactcaatgtttgtaattcttcttatactgctgtatcgtatgaatatagatcataggaaccttgagagtgagatgtaataaaagctgggacctcctagtcaaaaatttagaacaggaatattttgtgtagtgttatcttcgggaaacaaagtttgtgtatgttttatgggttaaactatcttttttcctaatgaattctgagactttgctaatgtttgttcacccattcaacaaatatttgtatttcttttctagcttcaaaggctgcatttctacagacttgagtaggatgtatgctcttggaacatctgttttgaggattagcagtgttcaagcaaaggccaaatactcatttctcggggtttgtgtagggcttcaccttagtttgtcttctccttgagtagagtctgagacaaagacataagcctaggtggtttatttgagagcttgcctgggaagtaggagtgagaagcctggggagtgagagagggaacaaaaaagtatgatgttgcgattgttgctgtgagcagtagagaaacctcctgagcagtgtgtagaatgctacccagtattacccatttgaaaggtggaaggcttgaccatttatccataagttctcattcccttttgattaaaggtgttaactcttttgtgctttaagctatacttgtgcttctgaagatgttgaggcgtaatgggctcacttgaggtgggatgctagaggataatgggagtatgaattcctgcagctgtggctgaaatgacacatgggccaagggagtgtgacatgagcttcaaaggtgtctgttacaggaccttataactaaagagtctctatagtctgctattttttttttttttggtcctagtaaggggtctaatatctattgtttattgtgcacttaggcattgaggtaattactttagatatattgtttcatctcactaaagtaaacatctaattttagatggtctcttggtgattatattatagtttgatattttcccagggttgtaaaagaattcacccgtattggaatttgttttactcacctgttctgaagggtatgccaaaggatttggaaattgaggtcttccaactcacttaactataaataataatctcatgggaagagatagtttcttctatataatgttatgtttaaggaattcatgatagcagaatattcctatgctatgtgccagggtagttgacccgggattgtgtataacatcccagctaacaaagatcaacctacagttttctttgaatttggtatcctagatgatctaattctccagatgagcatgtattttctcttcagtgatactgcctaaaagacttagggtagttaagagaattttcttcaacagctgccttttagtcttgctcctgtcccactttcatctctgactgattatcattgtgatagtcttgtcttccattttattaatgtctcagcataccattttagttcatagttcgtactagaatggatacaacatgcatctgagtttatttaacaaattttagattcttctttccttagttgagactttaaacattgttattctgttgctgatgaagtccatggtttatgtctgtcttagttactgcttgtaagtggccccttattaaggctcaagtttttattttggttctagatttagttttttggcttaaagttcaaattcttattgtggccaactcccttaatagactcttaccagtgtccttgaccctagctttgggaaagactactttctagaaattttctgttggctcacgatattagccatgctgtcaggctgtattcttacccttctcatacttgagctactctattggacccgtcatgtcagtctagcagactagttaagaacacacattttagagtcaactctacctacatttgagttcctggtctgatacttgctaactgtgctttccttgtttctgtgtcctgttccgtaaaatggacataatacttcctgttttgtaaagtatataaaatgcatagtacagtgctcggcatatgctataagtgcctgaaaaattataaaaagaacattatcatcactgtcctgctcctcctcgatgtcatcatcattattctttcttttgtagcttcttttcctttttgcttctttctccctctctacttttcttactttcttttttctttcttttggtaaatcttaactagattccaatttcgtgttttggtttatcagaacatcctggatttcgtcttacttatttgcagtattttatgcataaatatataatagaattttgtgcacctggctttttccaaattgtgacctcccgtgcactccccaacccacaacaatctatctttagcatctaccattccactgaaatagctttgatcaaggtcagcagtgaccctgttgctaattgaatattttcttctcagtccttatcttacgtgacctttaccatccaaagagatgactgtctcattcttgaaagattcttcccttgacttctgttttggctttactccgtctcagttttctttcagaatacattatcttttgcccattcattgaactatcattgtttcttaagagtttgatttatacctttttacgctttctaaaatgtttcaaattagataatattttatatacacatgaatatatgtatcatatatatgttaggaaccataatagccaaatgaattcttgtgaacccaccatccaatttacacactagacaattaccagtacctttatttttgtatattctctgtgaggctgaataatgacacagccacccaccaaatatgttcatgtcctaatccccagaacctgagaatgttaccttatatggcaaaagggactttgcatgcctgggcaacatagcaagaccctgtctccaaaaaagtaaaatcaaataaaaatttagctaggtgtggtgtcatgtgcctgtagtcccagctacttggaaggctgaaacaggaggattgcttgagcctagaagttcgaggcttcagtgagctatgattgcgccactgcaccccagcctgggtgacagagcaagaccccatctctttaaaataaaagggaggggaggctttgcagatgtgataaagttgaggatcttgagatgggaagattaccctggtgggcctgatgtaatcacaatggtccttataagaaggatgcaggtggagtcagagaaatagtgtagagttggaagcagagattggagtgatgtgactacatgtcaaagaatgccaacagtctctaaaagctagaagaaacaagaaacaaattgtcccctggagcctccagaagagtccattcctgctgacacattgatattagccctgtgagactgatttccaacttctgacttctagatctataagagaataaatgtaataaatgtgtgttgtttcaatccacaaatttcgtagtaatttgttactgcaactataggaaactaatatactctccctgtgtctcattatccaccatgacttcatttaccatctatttacactaaagcctaaatgtaaatgatttatttacatcatatgtacttttcacttaagaaattcaacacatatacgtggcaactacaaatgggtagagaattttttaaaaacagttaaaaatgcaagttaatactcttatttttctacttaatgatcatttaggactcaactaaagaaacggtagtttgttctagtgctagacgactggcttattaagagatagtatgtgagtctcctttggaggggatcttcctaaattagaatttccaaagatgatttttgctatttgcagttgttgcctaacactgactttaggacctgctcttcatgaaagatgtgattctgtatcttttccatgaattctaggtgcatagatctaaccaagacatcctcatcttggattttgcacaggcgtctcaaatccagcatacctgaaacaatgttacgatgatgacttcctccacaacttcgcttatttattttctttctttctttctctctctttctttctttctctttcgtccttcctttcctttcctttcctttccttttccttttccttttccctttcctttcctttccttcctttctctttctttctttctttctctctctctttctttctctttctctctttctttccctttcttttcttttcttctttcttttctttccttctttctttcttttggagtttcgctcttgttacccaggctggagtgcaatggcacagtcttggctcacggcaacctctgcctcctgggttcaagcgattctcctgccccagcctcccaagtagctgggattacaggcatgtgccaccgtgcccggctaattttgtagttttaatagagatggggtttctccatgttggtctggctggtcttgagctcccaacctcaggtgatctgcttgccttggcctcccaaagtgctaggattacaggcgtgagctactgtgcctggccacacttattttcctttttagtaattgtcaccaacacccagccagttgtctaagccagaaacctgtgtattattcttctctccttcctctcttaggcttcatatcagctagtcattaaattctagtattcattttcctaactctgaatcaatttccatctttgctacagctattgctatcatcctgcctcctaactgatctccctctcatcagtctcagtttgttctccatgttgggtacatgttgcaaaagtctaaacttcccagcatgccacagagtccttcatattccctgctcatttcattcttgggcattcatactttcatcagtcccctcctgacccaatctccagctgtacataaactctatattttagtatttctcaactgcttgcaacccctaaatgttttctctcttttctgtaattaaggctctgtctgcctagactatttcttctgctttcctgtctgtgccttctctgccccggcctacccccaacaccctttgcctatttaagtcctgtttatccttcaggtggcagtttaaccatcattttctttgaggagcattatctgaactcacaagtttagattaagtacttatctgtgaagtcttagagctccctctcttacctcatcatgtttttggaaactgctactttaagggaaacaatgtataaacaaaaccagtttaaccgtaggctaattgatataaaacaagagttaaaaaagatcatcacatttctaaataaaggcccaagcatttctaatattaatcattaaaataaatgtgagctagggctgggcgtggtggctcacgcctgtaatcccagcactttgggaggccgaggcaggtggatcatgaggtcaggagattgagaccatcctggctaacacggtgaaaccctgtctctactaaaaatacaaaaaattagccgggcgtggtgttgggtgcctgtagtcccagctacttgggaggctgaggcaggagaatggtgtgaacccaggaggcggagcttgcagtgagccgagatcgcgccactgcactccagcctgagcaacagagtgagactctgtctcaaaataaaataaaataaaataaaataaaataaaattaaattaaaataaaaataaatagctatatacacatttaagaaagatgaataaaaacaagtaagatacttatccatttatttcagttcagggtcaagagtggccagagccagccctgatagctcagagcacaggacaggaaccagccctggacaggatgccatcacattgcagggcacactcaaacatacccacactcactcagaccgtggccatgtatacatgccagttcagctcacatgtacatccttcggatgtgggaggaaactggagtacacagagaaaacccatgtgaacatgaggagaatgtgcaaactccacacagatagtatccctggccgggaattaatttcgttttttctttttcatcaacatataacaaaatgaccttgaacaagctgatattattcaaagacctgctgtacttactatgcttcatcatgatggcctgtttacttgtctgtgtttctctttagacttaagttcttcaagatcaagaactgtttcttcacctgtttgtttttacaggctaacacagtacttagcgtgtaatagatacttcatataatagatacttggtaaacatctgtggactcatttgattatggaatcatatagaaatttaaaactaatgcacagcagcatctccataagcagtatagcatatattttttttgagtcggagtctcgctctgtcacccaggttgaagtacagtggcacgatctcggctcactgcaagctctgcctctcagcctcctgagtagctgggagtacaggcgcccgccaccacgcctggctaattttttgtatttttagtagagatgggctttcactgtgttagccaggatggtctcgatttcctgacctcatgatccgcccgcctcggcctcccaaagtgctgggattgcaggtgtgagccactgcacccggccttatatatttttttcttatgaaataactgtttgggttttcaatatagccatcatggacaatgtcagagattaccaaaaaatgatgacttttatagctttatgatgcttcttatttcatactattgaataatactattgcaaactttatcttacggcaatatttactaaaatgtatatgtggagtcctgtcagaaagacagctttccatgtgatttgggttattagaactctaaagttgttcatgaaggaatggacatgtattgcaaatctaagtaacttccaattgtaatttttttccgtaataaatagctgtatagctattatgtgattttagaatagcagaatgcttgatatgcagtataaacccagactttggaaatagaagattatacattctgtttatagtctgcattaaatataccgcatgattttatttggctaaatttgttcaattctatgtattttggaaataaaagcaactcaaaaataggaatcaactagagtttaagggatttttaaatattataggtattgttacattttattatttcaattactgggagttgatgggtggcaagataagacgcactggtgggagtaaatttgggaagatgaagaattcatggcttttcaaccataatttaagctactggttatgtggtactatacctacatttaaaagttgccaagtgttgccaaccgtggttgccaagactgtactgcacataataagtacaaaatgtgtgaaagaattcaagtaatatgttaaatgtttaattcccttttcaatcttgggatgttggatgatcaatgaaaacagaagtatctggcaggtacaggcaacattgttaagaaagcttttccttacagtcctgctgcatctcacttacacctcccactccccaatgcacagttatttctccatgcatagaaaagtacttcatatgtacctttttcatagaaattaccatttgcattcaaactattggcattgcgattattgtttatatgtctgccttctcgcaataaactataaaatcttgaaagcaagttattattgggtttagcattgtgcgtaagacataatagatatttcatagtagatgtttggtgaattgagaataggaattagaatcttggtatacattcttaaatatatatggttgacggagttcaactgagcttcttttttttttgagatggagtttcggccttatcacccaggctggagtgcaatggcgcgatctcagctcactgaaacctctgcctcctgggttcaagtgattcttctgcctcagcctcccgagtaggtgccaccatgcccggctaatttttgtatttttagtagagacggggttacaccttgttggccaggctggtcttgaactcccgacctcaggtgatccacctgcctctgcctcccaaagtgctgggattacaggcgtgagccaccatgcctggcctcaaatgagtttttaaacataggtatgccaatttgtagttaataagtattaactcttgttagatcttttaaacttctcttcagagtattttattgcctggatatttaccagcataactaaaaatgttttctgtttttgtttttgttttgagatagtctcactctgtcgcccaaggtggagtgctgtggcgggatctcagctcactgcatcctctgcctcctgggttcaagtgattcctgtgcctcagcctcccaagtagctgggattacaggtgtacgccaccacacccagctagtttttctatttttagtagagatggggtttcaccatgttggccaggctggtctcagactgctgacctcaagtgatctacccacctcagaaaagtgttgggatttcagacgtgggccatagtgcctgaccaaaaatgttttaaagttaaaaaatcttaggtgaatattttaaaattatgggatattatgaaaagtcagttgaagaagtactggttttgtgtctcgttttcttgttgattaggttggttctgtgattaaaagcaaattgcctatataattctgatagtacttattaaaaagtcattgacttaggcttttaggtaactattcataatttataagggaagccagtgggagttttaattacttgttctgttctagtagtctgcagttttattgactcgatttggatgaatcttacaataaataattgttgagtttttcctaaacagtatgagggcctgtaaaagcataaattgaataacaagcagactattttcttcattaagctaaccacaatgaaaatttttgtgccgggcttggtggctcacgcctgtaatcccagcactttgggaggctgaggtgggcggatcacctgaggtcaggagttcgagaccagcctcaacatggagaaaccccttctctactaaaaatacgaaattagccgggcgtggtggtacttgcctgtaatcccagctacttggaaggctgaggcaggagaattacttgaacctgggaggcggaggttgcggtgagccgagatcgcgccattgcactccagtgtgggcaacaagagcgtaactccgtctcaaaaaaaaaaaaaagaaaatttttgtgtgtatgtgtgtgtatacacctgtgcctgtgtgtattgtaatttatttttatgtgtccttttgtgcttttatgcatatgttttttgttatgttacatttctgagttgatagttttttcttttgttttgaaactattggaattttctattaattttaagcaaattgccaagtacattaaatttgtagacatccatttttaaaattgtattttaaaatggcattgctttgctgactagtatagaatattttcagtttttcttttattaacaaataatatcggccaggtgcagtggctcacgtctgtaatcccagcactttcggaggccgaggcaggtggatcacttgaggtcaggagttccagaccagcctgactaacacggcgaaaccccatctctactaaaaatacaaaaattagctgggtgtggtggcaggtgcctgtaatcctagctactcaggaggctgaggcaggagaatcgtatgaacctgggagatggaagttgcagtgagccgagatcacgccattgtacttaagcctgggcgacaagagtgaaacttcatctcaaaaaaaaaaaaaaaacaaaccaaaacaaaaaactcaaataatctctagttatagtaacttattactaaatctttccttgatttgaatctgatttcagaaaaatgattgcattagaacaggccataggtagcaaactttactgtagttgttcaggaaaatgaattgtttagttagttagttagtttgtttgtttgtttatttatttattttgagacggagtctcactctgtcgcccaggctggagtgcagtggcgcaatcttggctcactgcaagctccgcctcccaggttcatgccattctcctgtctcagcctcttgagtagctgggactacttgcgtccaccaccatgcctggctaattttttgtattttttagtagagacggggtttcaccgtgttagccaggatggtcttgatctcctgaccttgtgatccgcctgccttggcctcctaaagtgctggaattacaggcgtgagccaccgtgcccagcctgtttcttccttttttttgagatggagttgtactcttgtcactgaggcaggagtgcattggcacaatatcggctcactgcaacttccacttcccgggttcaaatgattcttctgcttcagcctcccgagtagctgggattacaggcatgtgccgccatgcctggctaattttttttgttttagtggagacggggtttcaccatgttggccaggctggtttcgaacttcttacctcaagtgatctgcctgcctcggcgtctcaaagtgctgggattacaggcgtgaaccattgcacccggccgagttatatatatataaaataaattctaagagtctccttctctatcccatctgctcatttaccactgcttaccccactcccaaaaaatcattattagtttcttatgcttggagtccgtttatgcatatttaagaaaatatattattcttgcccatttttccacagaggaggcatactaattgtaattttcatgttgctttcaattttttaactttccattaaaattttcacacatgcagaaaagtggagtgctgtgaatctataaacctaccacctagatttaacatggttagtggttagtattttgctggttttgcttattttgcatatatatgtatataaatgagcaaaaggcatatatttgagtatgtatagattagcaacagacaaacacatatattgatctaagccatctgaaactcaattataaatatcatggtattccatccctaaatactttttttttttttttgagacagcgtctcgctctgtctcacaggctggagcatgtggtgctatcatggctcactgcatcctccgccctctggtctcatgtgatactccacacctcaacctcccaagtagctggaaccacaggcatgtgccaccatgcccagctaatttttgtgttttttggtagagacgggatttcaccatgttgcccaggctggtcttgaactcttgggctcaagggatccaccggcctcagtctcccaaagaactgggattacaggtgtgacaccatgcctggcaatacttcacttttttaaggtaaattaccactcagtcaatgaaggatttcaaccaaaagagtcacatgattgggtataataattacttgtttaggttgaaggtgcctttgaggaagagaagactagaggcagagaggccaattattaataagtgattgttgtacaggcatgctttggagatactgcaggtttggttccagaccaccactagattgtgcaaataccatggtaaagcgagtcacacaaattttttggtttcccagtgataaaagttatttttccaccacactgtagactgttaagtgtgcagtagcattatgtctaaaaaacagtgtacgtaccctaatttaaaaattctttactgctcagctcaagaatgttaacgatcatctgagccttcagtggggttctctttcctctcttgccttcctatgaattggtcctgcttgtgactagagggaaagaagtgaacatttgtttctccgcacaccagctccttcatgccaattacttaactagttatttaattctaccagtaattatttgcggtattattatccttatttttgcagatgaggaaattgaagtgcagagttgtgaaataatttgttcaagatcatattgctcttaagtggcagatctggaattttcacgagtctgactgactgtgaagttactacatgactgttatccagtttgtttcatgaagtgaaaaatatatgaatgctggtaatttttgttttcttctgcatgtattcattattcttaatgatgtgatcatcagccttttaaaaaacaatatgtcagtccatttgcaaatacaccactcttaggcactttatttttgaattgaagtatgcaacttgtaccaactagctttccctttgatgtaatattgccaaacaatgaaatatcatgtcttatattgtcaccatattttatttttgaattcactttttattttatttttaatatattttttatacaaatgtaatctcagtggttttagggctgatacagagaagttttagaccaaaagattcctaaaccgaagcaaaaagtgacaagttggaacacttgaaagtgaagagaaaatgcatagccatcttaaaaaaaaaaattaggaggtgatctgtccaagatgacacagtagcattagagcagttgtgaagcagatcatctaatggctttttgaccccttctgaccttcaaaagcgtaagaaaataaattattctgcccttaaagaccaaaacgtaggtttttaagagcaacatcttgattcatttgaaaatagtaaactctcaagctgtaacactcccaacctcagtcaatgtaaaacagacatcatacaatttaaattctcgtatggtagtccctagagaagcacttgaatagagaattgcttatcaaactgtgtcagtcaggatcctaaaccccaaaatacctgtagcttaaaataacagagatttatttcttgttcatgttgcatttcccttgtgggacagtcaggaatgctactccgtgtatcctcacttgggaactcagactaactactgttggttactgggatgtaggaaaagaggcagttaggcattgacttctaaagctactgctggataatgtcatttccccttatacttcactaatttaggtaagttacgttcctacacctaaccaagaagtggcaatgggagtgtagtctcaaaatacgattagaaggagaatatgattaatactgagtgtcaccttgattggattgaaggatgcaaagtattgatcctgggtgtgtctgtgagggtgttgccaaaggagattaacatttgagtcagtgggctgggaaaggcagacccacccgtaatctgggtgggcaccatctaatcagctgccagtgtggctagactgtaaagcaggctgaaaaacatggaaagactagactggcctagcctcccagccatacatctttctcccgtggtggatgcttcctgcccttgaacatcagactccaagttcttcatttttgggactcgggttggctttccttgctcctcaacttgcagatggcttattgtgggaccttgtgatggtgtgagttaatacttaataaactcccttgttagttgtgtccctctagagaaccctgactaatacagagaagaactggaatatgggtgcccagctggaatgactaacaagccttttgaggaatatagagaattacgcatgattgattggtagaatgatttttttaaaaaaatgccaaatagctttgaagtaatcctgttttgattgaattaagggtcttgttgctgaaaggtgaactaggcagtttagccagaaatgtccagtagaggagtaaactggttaattggacatccttttccttgtgttttgtctgttacattttcataagcatatttaagatttgctcttatgtgcttgcttataacataaatctattaataaagattcacagttatcaactatttttatgtagaacatgttggataatgatgctatgcaaagtctaaaaaatcaagaggttaataattggtaggacatataacaaaaactatctcatattttgtgttacataggcaagcactagtagtttttaaaaagtatataatttgggaaaatttgttccatgaggcagtacaaatgaataatcatattgaagttcaacagcttaattctggacttctgaaattttccaaggagatgagtgattaatagatacaaacatactatttttatgtacatatgtgaagagactgtctctaggcagttataaatcttcttcatctttgacaaacttttgcatatgtgtctttattggtgttgtaaaccagggattatctgtttcttcacaaggcatgctctttttaaaatattgtcgtggtttatacatactatgaaatttaccattttaactatttttaagtatatttcattggcattaagtacattcacattgttgtgcaaccattaccatcatatatctccagaactttttcatcttctaaaactgaagtctgtacccattacacagtaattctctattcttctctctcataagcccctggcaactaccattttactttctgtttctgtgagtttgactactttagataccccatataaatagaatcatatactattcttttgtgattggcttatttcacttatcacaatgtcttcatggttcttccatggtgtagcatatatcataatctgcttccatttaaggcaaaataatattcaattgtatgtatataccacattttgtttacacattcatctgccagtggacagtagggttgcttctgtcttttggctgctgtgaataatgctgctataatcatgagtgtacagatatctgttctagtccctgctttagtttgtctgaatataaatcccaaagtgaagctgctggattatatggtaattttattttaaatattttgaggaatcacactactgttttctgtaatggctgtgtcattttacattcccaccagcagtgagcaagtgttccattttcttcacatccttgccagtacttgctactttttgtttgttttttttggggggggggggtgataataactatcgtaataaatatgaagtggtatcttatggttttctttttcatttccctagcactcttttgcatgtttttgtgtggacatatgatttcagctcatttgggtaaatacctaggagcacagttgctgatcctatgttaaaactatgttttagctttgtagaaaactgccagactgtcttccaaattggctgtaccatttcgcattcccaccagcgatgaatgagacttctgttctcttcatcctttctcaaatttggtgtggtattttggattttagccattctaataggtgtgtagcactgtcattttaatttataatttcctaatgacatatgatattgagcactttttcatatacttatttatcatctgtatatcttctttggtgaggtgtctgtttagatcttttgcccacttttcagttgggttgtttgttttcttattgatgagttttgttgttgttgttgttttgagacgggatctcgctctgttgcccaggctggagtgcagtgtggcgcaatcttggctcactgtaacctctgcctcccaggttcaggtgattcacctgccacagcctcttgagtagctggaattacaggcacgtgccaccatgcctggcgaattttttgtatttttagtagagatgagggggtgtggcagatttcaccatgttggccaggctggtcttgacctcctgacctcaagtgatccgcccgcctcggcctcccaaagtgctgggattacaggtgtgagccgctgcgcccggcattgttgagttttaagagttctttgtttattgtagataaagtttcttaatcagatatatagtttgcagatattttctcctagcatgtggcttgtcttttcattcttttaatattaatagtatctttcacagagctaaagctgttaatttcaatgaagtccaacttatttatttttcatggatcatttttttggcattgtatctgaaaactcagtaccaaacccaaggtcacctagattttctcttacattatctttgagaaatttgattgttttgcttcctacatttaggttcatgagccattttcagttaatttctgtgaaaggtgtaatgtcactgtgtagattaagtttttgcatgtggatgtctggttgtaccagcatcatttattgaagagactgtcattattggattgcccttgtttctttctgagagatcagttgactatatttgaatagtctatttctgttccattcatctatttattttatagctaataccacagtccttattactatagctgtgcagtgtgtagtaagtcttaaagtcgggtaataacagttttctgacttcattcttcagtattgcattggctattttgagtcttttgtctttccatatgaattttagaatcatgcctggaataaatcctgcttggtcatggtatataaatcttttcatgcattgttgaatttagtgctaatatctgttaagaatttttgcatctatatttataagagaattagtctatagttttcctttcctgtaatgcctttatctagttttgatgtttgggtaatgctggtcccatagaatgaggtactacatgcttctatttcctagaagagattgtagagatttagtgtcatttcttccttaaatatttggtagaattcaccaggaaacatctggacgttatggtttctttttttggaaggttattattgattcattatctttaatagatataggcctgtcccgattattgctccttgtgagagttttagtaattcctgtttttcaaataattagcccatttcatttaagttatcaaatttgtgagcttagagttgttcataatatttccctgtttttttaatgtccgtgggatcaggagtgatgatacctgtttcattttatatattagggctttgtctctctctctctctctctctcatctgtctgtttctcttttttgttaacctgactaaaggtttatcagttttaatgctcttttcaaagaacagcttttggttttgtttatttttctttaccaatttcctatttacaatttcattgatgtttactataattttttttatcttcttcttgccttaggtttatgttgccctttttttttttctagtttcctgtggtggaagcttagattattgaatttagttagacctttcttcttttctaatatatgcattcagagctataagtttttctctaagcactgtttttggtgcatcccacaaattttgaacattgtattttcattttcatttagttcaaaatattttaaaatttttcttgagacttttttgacccatgagttatttagaagtgtattgtttgatctccaagtaattggagattttctagttttctgttactgatttctagtttaattccattgctgactgagagcttgcattgtgtggtttctattcttttaaattagttaaggtatgttttatgtcccagaatgtggcccatcttggtgaatgtttcacttgagtttgagcagaatgtgtcttttgccattgttagataaagcagttgacagatgccagttatatccagttaattgattgtgctgtttacttcaaccatattcttaactgatactctgtctactggctctgtcaattactattcgaagaatgttgaagtgtcccacaataataatgcatttctccttgtagtttcatcagtgtttgcatagcatattttgacattttcttgttaggtacatacacactaacgattgttacatcttgttggagaactgacccctttatcactatcaccttcttcatccctgataatttttcttgttctggagtcccgtttgtctgagattaatttagctgtggaagcaagatttgactagtgttaacatgctatgtctttttccatccctttacttttagtctgtgtctttataattaaaaatgggtttcttttcagtaatatgtagttgtgtcttattttttaatctactccgataactctcttttaattggtatatttagactatttgcatttaaagtgattattgatatcattaatattaatgtctattgtgctcatatcatctgcattccctctccctttttggaatgatttttcttttgctttgtaagcattttttatgtatcctacagattagtcttttatctactatatgttttacttattatctctgatttttcctttatatgaatttgttgttcagaaattatttttcattcctagtttgtggatattttgccttaatttggaagactttaaccactcaaaagttattaaaacaaacctcttttatacattatctcagtatttttttacacacagatacacatacattgcatttgtatatacgtatgtctgtgtttgtgtgtgtgtgtgtgtgtgtgtgtgtatatgcgttgatttttaaatccatctggaattctttggtacatgatgtaattcttttagaaagggattcagacattatgcttccatgaaaggatggccagttgtctcaatattatttattgaatagcccaccttttcaccactgatttaaaattgtatttttattatgtaataaatctacagatctgcatagtctgcttttgtactctgatctgtactatttgtttaatgtatatgtctgtgcctgggcatatacaggtattttaattacagtagtctgttacctggcaaggaaatcttactttattattgtttttcaaatttccttggttattttttatgaattttttcttctcatgagactcacctaattttataaaaattctattaggatttgtattactattgtatttaatttataagttaataattgacatctttgtggtaaattgtttccagttattaataacacatgtcaaaggatagcaacacagtttcttccattaaggcattccaagccagtagacgtattcttctgtggccaaggtagctcaatgatttgaccttcttaaatgtgaacatttcatatgttccttgtgttttgtaatataattactgtcatcaccatgacatctttatttcttattcttctctcatgtatatttattttgataacctgttgctataaatgtagatacatttctttctcctttacattttccgtcacaccctccggtttctttgttagcatcctccagtatcttgcccacattctcctacttattactcttcaattccatttcagagtctgttacgtgaacataattacccttatccctcttgcacaaatctttctttaatctgttggatgactctgaaaggattagtttcagtttggggcttgagctgtgtccagacacacaactgctattagttcctaccatagttctacctggttcagaagaatgagaaaaataatccttactttttcctcctctatgagcaggaggtgcttactttttactgatttgaccagctgaacattttaagataatattcagtactgtagatgaagattagaaattactgcaaaaactttaagtgagaataaaagaatttatggtgttctaaagagattttaaacaaattatcttcactattgttttctctaatttaaacaaagcatttgtgggttcttttcttttacttttactcagtctgtctttccagaatgttaaaatggtcccttaggctgggctcggtgtctcacatctgttatcccagtgctttgggaggccgaggcaggaggattgcttgagcccaagagttcaagaccagcctaggcaacatggtgaaaccatatccctataaaaaaaaacaaaaaattagccgagtgggatggtgtgtgcctctagttccagctactcaggaggctgaggtgggaggatcgcttgagccaaggaggtcgtggttgcagtgagccatgattgtgccactgtactccagcgtaggtgataaagccatatcctgtgtcaaaaagtaaataataaaataaaataaaatggtcccttgaccttttatctttaattttcccattaacagttggttctctcttttttctatctaatgaatacagtatgctgaagacagtttaaattttctttattgattcaagatattgaaaagcttcaagattattaacttgaaagttttcaaaggtttaatatcaacacatttcaggtgtgaggaaattactgtggcatggagaatatgtatatattttatttcaattaaaactctcagtaatatttccttatggcttagcatggaaatactttatgatataaggtgagtctgggttaatttaatttgtaataaattgacaacaaacgtaattagttctaatcaaaaggctaaagattgactccataatggtttttataagattaggagttttattttgtctaaaagtccaacacattatttctggtcctttgaaattactggttcaattttaatgtttataaaatcatattcagttatttatagggatgtttttaaatctatagctggacacagaccatcccaatagttgcttaaaacaacagtagtcttctgttttgcttacaaatgtacaatttgggcaggttttgccagggaagtttgtctgctccatgtggtgtctgctgggatagctcaacttccactagaggtttcatgtccaacatacctcacccacatggctggcaaagtgctattggctgtcaattcctcttcacaaggacctctctgtgggacagcttggtcttttttacaacttggtggctgggttccaaaagtgaaacatcctaagaaacaatattctaagagacagggagtgaaaacagatagtttcttaaggtctgatgctggaaacacacataacctcagtttaactttctcatattgatcaaggaatcacagagctccgattttaggagaacaggatacagacttcagctcttaatgggagggaggagcgtcaaagaaatttggagtcacagtttcaaactgctacaaggaatatgggaattttactaaattattcttagttgataggtagtttcaaaagggacatagtattagtacgttgggtcagtagtgttgtttagatactatttttcagtgtaatgttttaaaaatcttcactgtttaagactttttgaaaagtgtattttgaagtgttaaaaacaatatttacaagatctatatgaagaaaattagaaaactctgaggaaggatatcaaagaagatcctaatggatacatggataggaagacgctaagcatcatccatgaacgaaaaatgcatcagttaggcttcattaagattaaaagcttctgctctgtgaaagacactctaaagagaatgaaaggacaagccacagactaggaagatatatttgcaaaacacgtatctcataaagaactatatctacagttaacaaataattcttaaaattcaacaataagaaaacaagcaacccaattaaaaagtgggcaaaagatctaagcagataactcaccaaagaagatatacagatgactaataatcatatgaaaatatgttcaacgtcatatgtcattcgggaattacaaattaaaacaacaatgaaatagtactacacacctgttagaacgactgcaatccaaaatactgaccacaccaaatgctggcaaggatgaagagagcaagaagtctcatttattgttggtgacaatgcaaaatggtacagcactttggaagagtctggcagtttcctacaaagctaaaacatagtcttaacgtatgatcagcagttgtgctcctgggtatttacccaaacaagtggcaaatttaatgtccacacaaaaacctgcacatgaatgtttttagcaaaataaccccaatgttcatcagtggatgaagaaagaaagaaaatgtgtatatgtatggttttgaaagatttttttaaagaaaaacagattattatgtgagttgggtgattcttgcataggatttccacgggtttattaaaacaaagtagaactatcgtcagttccacttactagaatcaaatagactgtcatcactagaagaaactttagagcaacaagttcctcattttatgttttcaaaaaataaaatataaaggcagaggagttgagattttctcatctacagcaaaagatgtttatataaataaatatactgataaaaatttatctcatattgttatcaagctgtatgtaaaagacaacacaataaaaaagacaaaaatctcaccaaactgttttacttaaccagagttagaaataaggtttattgataaaaaccaggattagaaataaagtttattgattttcattttcaggatatctctttttctttcaggaaacttatacagaaaaacagaataaatggcttgtacgcttataattaccttgaccagtaatggtaattaataatcacaatcacaaccctcagagtttatcctttgggctgagaattaagaatgatactttacaaacctggaaatgtgagcaggccaattaacaaaacaaatagatggacaaaaataaaggcaaacccatgaggcaaagaatgtttttaagtttgtcaaaaatgaatattaaacagcagagtgagtaaaattaccatttattttctaatgattacacattagtcattgtttctacatgaacacttactactgagaacactgttttactgggtacattgcccagtaaaatatgattattaatattttggctgtttttgcttttggctatttgaaaaatgctgctataaacattggtgtacaaatatttatttgagtcttcacttttagttcttttaggtatatactcagtaatggaattgttggatcataggataattctgtttactttttgagaaactgccataccattttccatagtggtagtaccattttacattcccataagggtaccaatttctatacgtttctgttaatacttattttctgtttttatatactaaaatgttgtaaaagggtgtaaaatgctacctcattgtgttttgatttgcattgctctaattagttctgttgagcatcatttcatgtgctcattagccatttgtatatcttttttggataaatgtttatttaggtgttttccccatttctaattgggttgttttgttgctgtttgagttcttcttttaaaatttagaaatgaccccctacttacttgtacaagttcttttacctcttttagatgttgattccttactgttctattttgtattattttcttcttgtctgtcttacacttcacttacagtatatttagttttgatgtttttggttttatgtaatagcttctgtcattttttcctttatgctttctaggctttatatctttttttcttaacaaggtttttgtactcttaatattttccttccatctaccatttcactgatgtgacattccttacaggctaatcaacaaacagatatttactgtataattcatgtgtagtctaaaatttactatagattatactttgtaggtataatttttatttatttatttattttattattattttttgagacggagtttcattctttgttgcccaggctggagtgcaatggcacgatctcagctcactgcagcctccacctcccgggttcaagtgattctcctatctcagcctcccgagtagctggggttacaggcatgcaccaccacgcccagctaattttgtatttttagtggagactgggtttctccacgttggtcaggttggtctggaactcctgaacttaggtgatccgccatcctcggcctcccaaagtgctgggattacaggtgtgagccggcccgcccggcctatttttattttttgtttattcattttttgagacagtgtctcactttgttgcccaggctggagtgcagtggtgcgatctcggctcattgcaacctctgcctccaggttcaagagattctcctgcctcaacctcctgagtagctgggactacaggcatgccccaccaagcccagctaatttttgtatttttagtagaggtggggttttgtcatgttggccagactggtctcgaactcctgacctcaggtgatccacccacctcagcttcctgaagtgctgggattacaggcgtgagccactgcgcccagcccggtaggtataatttattaaatgctgtgttcataattgactgtggaccttcgttgctaccttaactgtccagaattggagaaaaacttttctccacatctgatatttgagtcctttaataattgttttctgcttagagggtagtttcttatcacatgatataacttacacaagcacacgttttaatttaggcaaatttttctgaaataattattgttttacataaaaattaaaatcactctttgcaatctaacctatcttaaatttttttacaaaaaatttttactgtaactttatggtaggattgttttacttaacatttttgtcctttttattgtattatcttttacatacagcttgatataaatttttatcagtgcgtttgtttataataaatttttttttttttttttttgagacggagtcttgctctgtcgcccaggctggagtgcagtggcgcgatctcagctcactgcaagctccgcctcccaggttcacgccattctcctgcctcagcctccgagtagctgcgactacaggggcccgctgctacgcccggctaattttttgtatttttagtagagacggggtttcaccgtgttagccaggatggtatccatctcctgaccttgtgatccgcccgcctcagcctcccaaagtgctgggattataggcatgagccaccgcgcccggctacacatgtttacaaaagatgttatataactttattattacaattagttggaggttaacctaaaattattaaaataaacctatccttaaagtaaattatatatggttttataaattaagaactttactttggattacaactaatatatactaagattttcttaaacaattaggacataatcgttttaagttaaatcccctttgtagtaaaaaattgcacaaaatgggtacagagttttaatctacctaataatttgcactgttttcatctaacaggtctcttcatttgagaaaatatagtgtagcttttcacggttttagttacccacggtcagctgtggtccaaaaatatgcagtggaaaattcccaaaacaaacaatttatgaatttaatatttgctccattctgagtagtgtgatgaaatctcatgccgtccagctctgtctcacccaggatgtgaatcatccctttgtctagtgtatccaggttgtataggatacctgcgttagtcagaacttagtagccatcttggtgataagattgaccgtctcagtattgcagtgcttgtgttcaagtaacctttattttacttaattgatctgttttattattagttattgttaatttattactgcctaatttgtaaagtaaactttatcataggtgtgtatgtattagaaaaaacagtgtatgtagggttcagttctattaacaattttaggcatccactgggcgtcttaaaatgtatcgtacaaggatgagggggagctacttactgcatttagaaaatgtgataacattttctgatatttcagattctcatgagttcacttatcattacccaatgtttttcttgtaatatgtggatttgtttaaaagtatttaaattttttaattgccatgttactgaccttaatgatttccaaaataaaataggtattaagagttgcttaattatacttctttaatataacaaccaggacatgtattttaactttgtgtaaatcatctagagttatttccatgttagtacattttgtgtaggtatatttctgagtggggcatttacagtgataaagaattacataataccttaaatttggtaaataattgacagatattttaaagtatattcataaagcagtaaaacctcttgtattatgttatctttaaattataattaagaaggttttctatatggctgtgtacacattatcaaaattgaacttttagcacaaaaagttcaactatttgtatcagttatttttgtcaattattggttattatgttgcattaaaactatggtagtgaatatattgtattaaaaaaaagaaaggaccaaatgccatatatttggggtggaaatttgagccacagttgtgtatacttacttttgcaatagaaatctatgtcagatagcctaatagtttggaaaactcttaagatgctaaaatgtcacagcacagtcagggatatgtatgacattcagtagtataaacaacaaagtgtacatgaaacgtccgttaacgttaagtaattggagtgagagtaggaaaatgctaatataaaggggctagattctctgcccattttacgtctaacttaatattttcattttaactaattttatttctcccattttgtgaatgggctacaggactaaactaataacattagttatacaaatcattcctatgtaaaatacttttggtgtgaaattagagtgaataaactttttattatgattgggatttttttcttttcgtttctgatgccatccgtttaagaatcagtgttccagaacaattggtatagctttgcatgtttctggctggtcgtgacaaatcagccactgtacactcatagacagcagtacagtacttgtcactggtggcctttctgtgacagagagcctgaagactgacgtaaagcgcagcctgttgtgaactgtcaagtgagtctgccaaaaactcagcagacagaactaattgcagagaaaaaggacttttgtgccctcttctctttctttcctttcctttttttttttttttaataagacagatattgttaaagtagcttgtttatgtaagatttgtctgtctctcctctcattgcctggatccttttttaacttaaagtcttgcactgcaggtcgttgaggacttccacatggagattggcacaggaccagactcaagacacacaactcataacagttgatgaaaaattggtaaggattttctactacacactgctatggttctgccttcagggttatttttgtactatagatattcagtatggtgttccaggttttcaggaaagtgatttgaatttgaatttctagattatacctaaattttaagaagaaatatttgtcatcaaaagataatttatattaagcattataaacaaatacaaaaccatatgcaaatattaataaattaaaattatgaaaggttttcatttttgtggtgtttataactagcagaacattcattactttttgtaatgaatgttttgctttttattttctcagttacactcctatttaagttgtgagatacttgctagtactatctaaaactaaatatattaggttttcttggaagcatgcaacatttattatcactatatgtatatatgtatatgcatacaaacacatacacacacattttatttcttcatatgtatgaagaaataactagcaagcaactagcaaacaactagcaagaccagcaacaaatgagtaataatgttttgtgaatcagtaacaaacagaattttggcagccatcacttataaaatattttagagtgtggtctgttactttacatgcaactttatatttatgcttcaatagcatacattttgtaatgtttccaaaacttctgatagaaatgagtaattgtatatgtgtgcttttcattttatatctggtttaccattatcagtgtttcttaactaccccctttattattgtacagtattttatcactcaactttgagcctgtaagcccaatctaagtaataggtcacacttaaatttctatttgcaccattaaagatacagacaaataaatgtataagtaaatagagacagtttggaaaattcacatcttgtgctgactggttttattttaaaattatctcttcagtttacctactgacattgtcatcatcctgatctaggttacatcatctttcacctagatttctacagtagtctttgacctgatctccctagactctttaatcctaatctgattaattttccttaggatgccaaaatagtctttgaaatgctggtattgtcaccctcttttcgtcctttggtgcttcctgttgcccttagagtaaacactaaaatcctaacatggtctttgacgtcttgcctgatttagctcctgccttcctctctaggtttatcttgtaccactgtgttttacattctgtggtctagccacaccaagcctggaacttgctactctttttcctgcttcaaggcatttggagttcctgttcactctacctggatgcattttaactaatcctgaggacttcatccggtcaccatctacctattcttcaaatggtaatcaaacaccacttgcttagtcaagtataaaagaaatgaggggcagggcatggtggctcatgcctgtaatcccagcactttgggaggctgaggcgggtggatcacgaggtcaggagttcgtgaccagcttgaccaacatggtgataccccgtctctactaaaaatacaaaaaattagctgggcgtggtggcgggtgcctgtaatctcagctactcaggaggctgaggcaggagaatcgcttgaacctgggaggtggaggttgcagggagccgagatcgcaccattactctccagcctgggcaacaagagtgaaactcagtctgaaaaacaaaacaaaagaaatgaggcagttatgtgtgtatgaagtgaggatgattttcacatcctgtgtgttcattaatgagagcactattattttaatttttcctatgagcatctttttttaactctcaggaggttgccttttctataaagttttcaaattttagagttcactaataactcttctaagttctcttctttctagtttgaagaatgagtgagtcagccagtaatacattgccctaaacagagtgctatgaagcatacaagagaggtagacagactggattggtttggtatttttaattatatgtcataaaatcggttgcatactgttgaattttcttgccctacctagattttccccagctttgttatacctttcttgaagtaatagttgtccctcagtacctgtaaggggattggttctaggactcccctcaagtaccaaaatccgtggatgcttaagacctgtgttagactgttctcatattgttataaagaaatacctgaggtgggacgcagtggctcgtgcctgtaatcccagcactttgggaggctgaggcgggcagatcacaaggtcaggagatcgagaccatcctggctaacatggtgaaacctcatctctaccaaaaatacaaaaaatttgctgggcgtggcggtgtgtgtctgtagtcccagctgctgaggaggctgaggcaggagaatggcgtgaacctgggaggcagagcttgcagtgagccaagattgcgccactgcactccggcctgggcgatagagcgagactccgtctcaaaaaaaaaaaaaaaaaaaaattagccgggcatggtggtgggcgcctgtagtcccagctactcaggaggctgaggcaggagaatggtgtgaacctgggaggcggagcttgcagtgagtggagatggcgccactgcactccagcctaggtgacagagcgagactctgtctcaaaaaacaaaacaaaacaaaacctgagattgggtaatttataaagaaaagaagtttaattggctcatggtcctgcaggctgcacaagcatggcaccagcattgctcggcttgtgaggaggccttaggggaccttttactcatggtggaaggtgaagtgggagcaggcacatcatatgacaaaagcaggtgcaagggacagggtggtgccatacactttctgtcatccaggctggagtgcagcggcgcgatctcggctcactgctacctccgcctcccagttcaagtgattcttatgcctcagcctcccgagtacctaggattacaggtgcccgccaccacgcctggctagtttttgtacttttagtagagacggtttcaccctgttggccaggctggcctcaaactcctgacctcaggtaatccacctgcctcggcctcccgaagtgctgggattacaggcatgagtcaccgtgcccactgccatacacttttaaataaccagatcccataagaactgactatcactaagacagcactaagctctgcatgagagatctgcctccataacctaatcacctcacatccgtccccactttcaacattgaggattacatttcaacatgagagttgggcagggacaaatatgcaaactgtatcaagtcttatatcaaatggcatagtatttgcatataacctatgcatattctcccatatactttaaatcatctctagattacttacaatacctaatacagtgtaactgttatattgtactgtttagagaataatgacaagaaaaaaggaggtatacgttcagtacaaatacaaccatactttttcttttttcaaatattttttacctgcagttgatttaatccacaatacagaaggcacagatatggaggcctgactgtagatcagaccagaatgtcactatggttttccagctgaaatcaattggttattatctttggtacatggcagacattttcttgaaaatgaacctgtcacttcaaggaggtgttgcccatgatacacttcaagcgcagtgatagtttttcaaccgttgtgcccatctctccttcccagaacggtctttaaatactagaaagatgtcaagctcaatcacatccatggcagaattaagttctataaaaattctaacattgtgtactatgctcaatacttggttgatgggatttatctgccacaaatctcagcatcacaaaatatacccaggtaacaaacatgcacatgtacctcttgaatctaaaattaaaaattgaaattctgtaaaaaaaagaaaaaaaagactgttctagtgggattggtaatgacactaacggatgtgatttttgatactgtgtaatgcaatatattaacgtttggaatatctatatacctctatgaactagtatttttcgtatgaccagtgcatgatataaaatcatgcatgggtaaaagtttcctttaaagtacaaaatagagcaatggattttaagtaatcaagtatgaaaatattaaggctatgaatattttgctcctttttctaactacatatctgtatgataatgagttttcttcatatattgcaataaaaacaatccaccaaaacagtttgaatgcaagaacagatgttagaattcagctgtcctccattaagctagatagtagattttcaaacgagtgccaaaatgcaaatgagtgccactcttctcacttttcagttttcaaaaatagagttttttaaattaaaatctttatattattacataactggcttattttacattaaatttatattgttttcttcattttaatttattatgtgatagatatttatggatatacaggcatactttgaagatattgctggtttggttccagaccaccacagttaagcaaatgccacaataaagtgagtcatgaaattttgttttggcttcccagtgcatataaaagttatgtttctaccacactgaggtctgctaagtgtgcattagcattatgtctaaaaaataatgtacataccttaattttaaaacactttattgctcaaaaatgctaacgatcagctgagcctttagggaatcgtaatcatttgactggtggaaggtcttgcctccatggtggtggttgctgaaggttggggtggctgtggtaatttcttaaaataagacaacagtgaactctgacacactgattgacccttcctttcatgaaaaatttctctgtagcatgtgacactgtttgatatcattttactcacagtggaacttctttcaaaattggaatcaagcctcttaaaccccactgctgctttatcaactaagtttatggaataatctaaatcctttgttgtcatttcagcaacgttcacagtctttatcaggagtagattctgtctcaagaaacgacttagctcatgcatgagaagcaacttctgatttgttccagtttaatcatgagattgtagcaatttaatcacttgtttaggctccacccaccacatctgcagtgacttcctccactaaagtcttagatccttcaaagtcattcatgagggttggattcaacttctttcttttttgtttttgttttcccatattgaatcaatatttatttcaggacatgccatgtcaaaataaaacaaagattcaactcttgcctttaacaattgtattgtattataaaagcactttacaactccatcccatgtttaagtataagttactggcatgtgggctaatgattatctgtaagcatttctctattcagatccataatctaggtgctctctgaatattacaaggtgacaataagtgggaagtggaggaggaagaggaaagagaggggactaaggttctcccagtttaaggttttggactcagtttctttcaaacgcgtgctaatgttgctattttcatctcctatgagtcacaaatgttcttagtggcatcttgaatggggaatcctttccggaaggttttcaatttactttgttcagatccatcagaggaatcactatggtagctatagccttatgaaatgtgtttcctaaataataagactcaaaagtcaaaattactccttggtccacgggctgcagagtggatgttgtgttagcaggcatgaaagcgacacccttgtacatctccatcttgggtgaccaggtgcatggtcagtgagcagtaatattttgaaaataatctttttttctgagcagtagatattgacactgggcataaaatatttagtaaaccatgctgtaaacaactgtgttgccatccaggctttgttattcatttatagagcagaggcagaagagatttagcataattcttaagggccctagggttttcagaatggtcagtgagcaccggaattgcattagcctctaagagtcagcctgtcctttgaagctttgaagccaggcgttgacttctctctagctatgaaagtcctagctggcatcttcttctgatacaaggctgtacattgaaaatctattgtttagtatagccacctttatcagttatcttatctagatcttctggatcacttgctgtggcttctctgtcagcacttgggccttcaccttgcacttttatattatatagatggcttcctccttagacctcatgagccaacctctgctttcctcccctctcagtcttcaaagaattgaagagacttagggctcctggctctagattagactttgaattaagggaatgttgtagctggtttgatcttctatccactgaaactttctccagttagcaataaggctgtctctttagccttcttatcattcatgtgttcactggaatagcatttttaattttcctcaataacttttcctttgcattcacaacttggctgtttggtgcaagaggcctggcttttggtctgtctaggtttttgacatgccttcttcacctagcttaatcatttctaaatttttacttaaagtgagagacatgagactcttcctttcacttgaactcttattgttgggttattaactggcctaatttcaatattgttgtctcagtgaatagagaggcccaaggaaagggtgaggtacgaggaaatggcttgtcagtggaggacacacacaacctttattaatttagtttgctatctaatatggacgcagtttgtggcaccccaaaacaattacaatagtaacatcaaagatcacggatcacagagcaccataacacatacaatgcaaaagtttgaaatattgggagaattgtcaaaatgtgacacaaagacttgaaatgagcacacaccagtagacctcaacagagggttgccagaatccttaaatttgaaaaaacaaaaacataaaaaaacaaaaaaaaagaagcaccattaatctgtgaagcacagtaaagcaaagttcataaaatgaggtatgcctgtatcttttataaacaaaaccttggagtcccagtagtttttaacagtataaaggaatctcaacatcaaaaagcttgcgaatcattctcctaagtcttctcttttctgggttaaacatcgccagggctttgatttatttcatatgagttccagttaattaatcatcttgattgccatccagtttgaatctcttttaaaatgtttttgccagaatttttcatactacagatgtggtgcaggttgtggtggggattattgcctttattccttttaatcatcgcagttctagtaaggcaactttaaatttaggttgtcatacttatgtggatttcatggagagctaaaacctcagattctctcttttgtgtgctgttatcaagtcgtgtttcttttcatccatctttagtatatgatcattatttttaacatattcacagagtcactcataggacatcttacccagtaaagcttattttatttttttactgttacattttagaattttctatacagtatacaataaattacaagaattttcatagtactttgtggatgtcagtgctaatacaagtacaaagaaaaacttgtggtttttttttttttctgggcatcaattatgtatcaacaacatgtatcttatcttttttttaggcataaaatgtagaaaggaaaagtctgcttagcattttctagtgcaagaatctattctttcattttggaactatatacaatgttaacattgttgagtacaaatcttcagataataaaattgtggcaaatcctggattattgttaataaagaatatggcctcagagtactttctatgtttctaattagtcaattttagtttgttgtgtataaactgctaacctttttacccttgaaactaacaagaatgtaaatatcaaaagagtagatgacagcatctgaaaataatcctgtaagcttatgtttagaagcacaatgcttaaaaaaaaaaactttttgtggactgtaccattatttcctaatatatgatacttcctacagatactaaggagatcttataaatggttgtttgcttggcccttggtttttgttgcaggaggagctgtgccatgaggttaggtgaagaatgtctttgcctttgtgctttattatgagggtaacttttttttctttatgcctccctccacctcagtctcctttcaggacatttgatgaatacgcaagtccaatgaacatgttgtcttttttatattcacttcagctatacaaaagagagaagttaaatttgcaatgctctttaaagattttgagtaggtactcccctaaaaaacaaccaaaatattaattagtcctacataggtataccttcaatttgctttctgatcatttttttagcccattttttacacactgattcctataactatttagtacagttaaaatattactaagaaaatagaaaaataccctcagaaaatatagtagtttcaatttattagtaaaaatgacacaaaataagctttaatagtttagacattacatatattgtttttatataaattatgttggctgctatctctccttcattctttgtttatttattcaataaatacttacatatgccaggcactatgcttcagtgttgtattgacactttacattgttttcatttatatgctaagttattttgtttaaaaactattaagcaccacctgttttaacttttacaaaggtagtatagttagttagatatgcatcctcaatttaaatatatgtgaaaaaggaaactttttatttagcaatctgtaaaacttaaatcttttgggagtgtgtggagtgaggaaggacatctattatttcaaaacttttttgagaaattatagcacaatgctattaatgtaaaatcctaatagttttgacatttttagcactctaataatatctttatttaaaaatcaggtgtgcctgtaaaacaaatgttgtcagtattctgaatgttgccaattggttgtattttgctacttgaaaatttcttccaaatagcaattaaacagcacttaagctttggtacttgctgaggcttgcaataaataaatcgctgtttgattaattagcacacggtactggtagcatgctcagccgatgaggttttaatattgctgtgttagaatgtctgtaagcagcagcaagttatttaatacaatttttttgtcaatttgtaatagttaaaaacattttattactcgaacttattctaagaagtttgtaaaattgaatggtttttgcaagtcttcgaaaataaaacaactacgtttgctgtacaagtatttgttggttttatgttgttttttcttcctgacatactaaaagtttatagatgaaaacttatataagtctgcaaacttgaattaaaaattgatcattaagaggtgacctacacaaaaagataaccttaagttaaaggcttacttttgctttgactgtttactttttttttccccctctaaggggtcagttttcttttggtgagattactttcttttggtgtatggcagtgctatctctgctagattactggaaggagtagtgtctgcgattggggttatacagctttctagcatctcaagtgtctgttttgtctggactttactcacgcagcattcttgtgcaaaaatttcaaggctttagtctggagcactgggtcaaaggatatgtctctttgaagggtagacaggagttttttatgttttattcactaagtagtatttcattttacatcaaagaatagcagcctttgagaacctaccatggtggcagtttagcgtgtgggtttttttctttaagactttcactaaatatgtataatgtttcttcaagtgtttcatcctacaaaatgcctatttttattcttagatgaaacttctaatataaaaagagaagaatcatgactaaatataaatgtttgttgcaataaattttgttttaaaagcaactatagtttttttttttttacaatgtatttccctgtgtcagtttttacactacccacaagctattgaaaaaaaaaaaaatggatgaatagcctttaagattgcagcaatactgttgcttaaaattctaaggaagcagtaatgactagtgattttggaagtgtagatttcatagtgaaatggtcattccttaattgttccttttttagtactgtcatgtgtgtatgtaggagagattgattttgaaaaataccagactcaagtaatggaaaatgttaagacttcttgaagctagaaggaaagctcttctttttgtactttttgtgtaagttaatcagtaaataatcatataaaaagtgattgctttacatgtttggaagattattacattgtatttcatatttttgtctcatgacatgtatctataaacatgaactaatattaaaagttttttatgtttataaataaaacatgctcttaaatagttgaaagtttatcaaaacagttaatcatttaaaatgaattttttctactctccttgatgtaattttaaaacctgttatatttaactatgatgatcattaaaacaagtcagttattatttttcaaatgtaattatttctaaattctttagataaataaaattctgcagaactttgttgtttaaaatatatgcttattgaaatgctatttttatgtagtatcaagctgtgtaaaacttacatgtactaaatatcacaaagaaaatgaatgttaagtattacagtttttatatacagacaggaaccattaaaacttagagaatgatcgttctatatttaaattgtttaaggaacaaaagatctttcccctacagtattcagccatctctattatctgtgattcttcagcaattaaagcagatttatttccctctttgttcctacttggaatacttgaacaatactggagaattgaactgactgaaatgttttatctttcaaaaggtttaaagttctatgtaccaattagcaaaatacagtaaaggtttaaactgttaatagccacaacatctttaatgcatagacctgtagtatgctagtgctgtataacagttctccattgtgtgtctcttttaagcagagtaactgtgtcagttcttttcttgctttactacctgctgtgtatggaaattgtgtatcgtacttgacacttgctttcaagaatttaaaattcttgcatgttattatgtaggaaactttggctctcaagaaaatagaattgataatatttcatttgtttggattttaagtttaggttttttgtcatattctagagagtactcatttatatctgaaaatacattattagtctattactcattagtgaatttgaagtacataaactgtatgttatctccttgaaaattgcttatctaatttttttcatttaactgaatataattataaagaaaccatcaaatttatggtagggtatgcagatagatccctgatgctttattttacactctatttgaatttggttttgggttttttgttttgttttgttttggtctttttggtagtaaatagtactttgtttttaaagttatagctcttgaattagccagcttgccagataagtttataactcaagaattaatccaaatacttaaacttgttaaagccttatatctgccattttgtagtaagttctcaatgaaggtagggtgagaggaggtaaagaaatagaagtagtatcttttggtgacaattatattttctttttatatcatgtatctcagaatagaattagagcaaaagaaaggagaacgtagactttaaaatttgagactagcaaactttgattctatttctgtgttcaggttttctaattttatatgacctagtgtctgcttctattctactcttcaaaataccacctgcaagcatgtgagatattcatgttttataagatggggaagtttgaaaaatagggcagtgatatggaagctttactgtatgcagtatactatgtctccacaaaactgcttctttataaggcatacttttctagaaatgtgtgaataggctttttgttcagttgctgtttcatgtttaatactttacttctaaaggctttcagcatatttcatgttagttgatgagggtttttaaaatgttaatgcttccaataaaatagacatgaaaaataaacttggctttctctaaacaacatataggatacagaaatataccaaaatgttgggctgagaatgctaacttaaagaactgaggatctgattagtgtaccgatgtacatctattccagtgattactgagtatatattgtgtaaattaagatgtatccattaaagataatttttaaacctaattgggtagtttaagatttgacatccaaagaattaaaacaagatttctgatttagtatgcattataatatcttaaacattcaaatatggcagctatagcctgtgcctaggttgctctgagattagaagtcctctagatctagtagttttcatctaggacaatctgtagttgtgaagatcattcaagatatttttttacttgtctcttatttataatgtaaaatattattatcctttccttcattcattcaattttttttttttagcatattctaggccctggggatgtagctatgaacaaagcacaacaaccatgtccttagagcttatattctcatgcttaagcatatgccagctttattcataaataattatggtatttttcatagattatgaatattatggaaaaaacaaagctaggtgatgagacagagaatagctggggtttgggtggaataggggtcatttaagtagggcagtcaacgaaacccactttgagatgttgtgctgtgtgaattaagatctgaattgatgagaaagaagcagctgtgtgagtatctaaggtaagagcattttgagtaaagggaaaagctaatgaccaaaagtgtagctggtagtagtcaaataacagacggaaagatatgacataataagaaaggaggagaatgatataaaatgagatcagagatgtgggcaggagctggatcaggtaagaaggctctttaggcccatagtaagaaatttgaatattatttgaattataatgagaaggctttatataattctaagtagaaaagtggtttgatccgatttacttgtaaaagctagaaaattactaagctattatggttaagggcaactttaaagaagctcaaaggaaatggttagtttgctgccattttaatttgaaggaacctaatttttgtctttgcataggttttatatacgatataacaatttggtgattttttttctattaaagaatcttctgaatttgaaattgctttttgagaaaggcagtattgggaccaggaataataaactcatctctctaattctccatagcccttctttctctgccctgcccccttctccaccaagggaaaacatgttaaagatttgtcatagtggtaaaggaagataagaataaattggctgaggtgctgtccaccagtttggtgctgatagcttcaaatatatttgagttctgcaccttgcttttgccagtggcatgggttgatggtgatagttgtctgtcttcatcttaactttgactgcacttcctcttgttctgcctctcctttcccccctcttactctctgcttcttgaaatctctcttcacagtttgtatggcttttcccctctgtcttttgacactctgtcttttgctgactatgtagctgtaggtcatctctctctccctttctggctacatgtgttttcctgataccaccttattcccttccatttttttcatttttcctgccttcccttctgtctctctctagttttggctttctgagtcattctttggccgtcattttttcccccactcccctgtctcttctaccgcccgttttcttcttccttccattctttttattccgtacttctgttccttttatctttcttcttctttctctcactttcccaaaatgactaaggagcaacatcaaaactagtgggagagacaaaaggtgccccaccctctaagcacttttttaaaaattgtcatatttcctcttttgtaaatatataggacttttagaaacatttaataactgaaaaatggtttatacattattacattatttgaaatgttcactctagtgagatacatgggataatggcaagatcatggactaattataaatatagccttagatctttagtcatctcttcttttagctgtataacctgaagcaagttatttaacctctgtgagtgtcctcatcttataaaatgaatatacctttttatatttgttttgaaagttaattgagaataccaacactaaacaagaggagagcctggatgcagtggctcacaactgtaaccccagcactttaggaggcctagttgtgaggatcacttgagcctaggagtttgagaccagcccaggcaaatggggaaacctcgtctcttccaaaaaaaaattagccgagggtagtggcgcgtgcctgtggtcctagctacctgggagactgaggcaggagctgaactattaatactcaggagattgaggttgcagtgaggcgtgatcatgccactgcactctagcctgggtgacggagtgagaccctgtctccaaaataaataaataaataacgcattatgttcattattcactaaaaagtgtttttcttcctttttttgctacttggagttgttagcctggagagagaagcaagctggaattataattattattcttaatcagttttgaattattatggagcccattcttgtgaatcaaatctgcagtgcaggtactaagttctagggcaccctggagcacaatattggcttcacagtggtcctgtgttagtcatgtgtgtatacgtatgtacatgtatagttggtaatgatttttgtcatgtaacttgccttttctaacagcctgtggcactaatatcatctgtgatattatctctcaatatacagtttctgacaatcaactatgtaattctttaattggtagataggtgtattgctatataattatccttccagtgagaaatttctttattctttttaatggtggaaatttgtaactgtattacttcaaggaagtttccaaagtacttattcctattattatatttggtcattaaaccctgtgtaattaaaaaattactggttttaggctgggcacagtggctcaaacctgtaatcctagcactttgggaggctgaggtgggtggattgcctgagctcaggagttcaagaccagcctgggcaacatggtgaaaccccgtccctactaaaatacaaaacattagctggtcgtggggtcacgtgtctgtagtcacagctactcaggcggctgagacatgaaaattgcttgaacccgggaggcggaggttgcagtgagctaagatcgcgccactctactccagcttgggcaaccgagtgagactgtctccaaaataataataataataataataataattactggttttaatagtaaggcatagacatatcaaaaatcacattagaggccgggcacggtggctcacacctgtaatcccagcactttgggaggccgaggcaggtggatcaggagttcaagaccagcttggccaacatagtgaaaccccttttctgctaaaaatttaaaaaaaaaaaaaaaaaattagccgggtgtggtggcgggtgcttgtggtggcgggtgcttgtagtcccagctacttgggaggctgaggcagaatcgcttgaacccagaaggcggaggttgcagtgagccaagatggcgccactgcactccagcctgggtgacacagcaagactctgtctcaaaaaaaaaaaaaaaaaaaaaacacattatacatcataaatatatcaaattttactaccaataaaaaagatacatattttttaaaaacatagtaatatgtacatgttgtggaaacattaatttggaaatgaagaaagcataatgaagaaaattaaaatcaccttaatctcagtcttggtgaatttacttcttttttatatgaatatttaaacacactaatatctaatgtatttatatgtaagacaaattgttttacagttttttatcctgtttttcactttattataatgtgactatatttctttaaaattattcaaaagcataattataaacgaatgtataatctttcattgtatggctgtaccataataccttagccatcatgcagtttttgtactgcaggttgtttacaattttttgcaactatacgcaatgctagaatgaacatctttatacctaagtctaatctttgatgacatctttattttagtatcaattctttgaagtggaattactaaattgaagggtttagtatcaacattttaggccaggcgcagtggcaaggtgggaggattgcctgagcccaggagttcaagaccagcctgggcaacatcgcaagaccccatctcaaaaaatgtaaaaaaaaaaaagtatcaacattttaaatattttttgatacctagagataattgatacagaatgcttttagagaagattttaccaatgtaactttagagatatggctttatttttaatatacatggcctagttctgtggatacttttcagactctgacacagggggcatgtagcaaattctacctaatagataaataccatatatctaagaattagagtataataaaaatacttaatacattaatgatgcaacattgatttagaagtacttcaaggcttagtatatatatcctaaggatcaacttacaaatttatgtatcattgtactataaattggtggatattgctggttgatgagatttctatcacaaatctctgtatactaggccaatgcatagcagttagtgctacagaagcattaactattgctgctgctgctacattagtaccactgttactattattttataaagcattataacagagtttgtggcataatgtatctgaggaagttatgaaactttctacctattcttacattcagtctatgtttttgttttgttataaagcctttccaaaacaatgcaaggtaaacatcatcctctgaaatatctacagtacttcatcatttatttggcgaactacattattactgatttcaaatttaattctgtagtcagcaacatactctatgatttcaattttcagatttcttgagacttttttatcgcctagtgtatggtctgtcttgattaatgtttcatacacattttgaaagaatatgcattctccagtttttgggttgggtgttccaaaaatttcaattaagttttaagttgactaatagtgttactcacattttgtatatctttaccaatatttttgtccacattttctgttagttcttgagagagaagagttaacgtctcaaactataattggtatctttcctgtgtgtgttggatcacatttttgcttcacttattttgaaactactgttggttggtgcattaacattgaaaattgttgtgtgttcttgataagttgttgctttattcttatgtgatgtccctctttatcctggtgctgtttctttttctgaagtcgaatttgataataatatataactgcctcagttttcttattcttagttttgtatggtacatcttattctcatttgtgagtttatatttaaagtttgacctttgcgattatatgtgggtcttacttttttatttagtttgacaatttctgtcttttaattttgtgtttaaaaaattatgtgcaaaatatttattgatataattgggtttacatttaccatcttgctgcttgttttctatttgtcctatctgatttcttttttctttcttttttgttttaacagttgctttagggattacaatatgcatccttaacttttcatagtctgccatgaactaataatgtattacttcatatgtaacataagaaccttaaaacagtacttccacttgtcattccagtcctttgtgttaatgttgacacacattttacttccatatttgttataaacctcatagtaaatttttttttttttttttttttttttttttgagacggagtttcgctctgtcgcccaggctggagtgcagtggcgcgatctcaactcactgcaagctccgcctcccgggttcacgccattctcctgcctcagcctcccgtgtagctgggactacaggcgtgcgccaccatgcccggctaatttttgtatttttagtagagacggggtttcaccgtgttagccaggatggtctcgatctcctgacctcatgatctgcccgtctcggcctcccaaagtgctgggattacaggcgtgagccaccgcgcccggccgtaaattattatttttgcattaaacagttgtcttttaaataaatttagaagtgagaagaaaaatcttttgtacttactcacaaatttatcatttttgttgctcttaattattatacttcatgtagataaagtttccatctggtatccttttcctttagcctaaagagccttatttaacatgtcttacagtgctgttctgttgggcagaaatctctcagcttttgtttatctagaaatccctttattttgactccacttttgacagaccttgtcttagctcagggtgccacaacaaaataccatagactgggtggttcaaacaacagaaatttagtttctgacagttttgaaggctagaattccgaggttaaggtaccagcatggtcgtttctgttgagggctgtcttcctagcttgtggaaggccacctccttgatgtgtctacatggccacagagagagagaaaaagcaggtgagctttgtcatatctcttctcataagggcactaatcccattatgagggccttactcatgatctcatctaaccctaattacctcccaaaggccccatttctaaataccatcacatttaggattagggactcactatacaaattttgggagaatacaaacattcagttcataacagaccttttcattggatatagaattctaggttgaagattggaatgacttaaaaatgtcattccagtttccttttttgaaaaattatgttaaaatatacattgcacaaagtttaccatttttaagagcacaattcagtggcattaaccacattcataatgttaagtaatcatcaccactatttccggagctttttcatcatcccgaatagaaactctgtacccattaaatattaactgtcctttatgctctcccctgttcctcataacctctattatactttctgtgttatagcatgtgtcagaatttcattccttttaaaggctctacataatagttccattttatgtgtatatcacactttgtttatccatccttctgtcgtcgaacatttggattgtttctagggctattgtaaataatgctgctattaatatggatgtctaaatatttgttcaaatctctgctttcaagtttttaggaagatgccccaaagtagaattgttggatcatgtagttattatacgttgagcattttgaggaactacatactgttttccatattggctgcaccattttacattcccacagcaatacacaaaggttccagtttctctgcatcctcaccaacatgtgttattttccattttcattataatagccatcctaatgtgtgtgaagtagtatctcagtgtggttttgatttgcatgttcttaataaattagtgatgttgagcatctttttgtgtgtttatttgccgtttatgtatctttggagaaatgtctattcaagttctttgttcattttgaattaggtgtttgtttttttgttgagttttcagggttttctgtatattctggatcttaatcctctatcagctagatgtcctttgatgcacaaaaattttaattttgatgacgtctgatttatctgtatttttttgttgcatgtgcttttattgtcatatccagtaattccttgccaaattcactgtcgaagatttcctcctatgttttcttctcaaagttttacagttttagctcttccattgaggtctttgatctgtttttttgtttgcttgtttgtttgttttgagacggaatctcctctgtcacccaggctagagtgcagtggcgcaatctcggctcactacaacctctgcctcccgggatcaagcgattcttctgcctcagcctcctgagtagctgggactacaggcgtgcaccaccatgccctcctaatttttgtattcttagtagagatggggtttcaccatattggccaggctactcttgaattcctgacctcatgatctgcctgcctcagcctcccaaagtgctgggattacaggcatgagccaccacgcccggccctttgatccatttttagttaactgttgtatatggtgtaagacaaggattcattttcattctttagaattggatatccagttttcccagcaccatttgttggtgctttccacatcaaatggtcttggcacttctttaaaaaaccaattggctatatatgcaagggtttatttctaggctattttatttcattggcccatatatctattctctgtcataccaaactaattattgtagctttgtagtaagttttaaaatcgggatttatgagtcctccagctttgttcttcattttcaagattgttttgaaacaaagatttcacgtgaattttaggatggatttttctatttctacccccaaaatgtcactttttatagggattgcattgaatctgtagattgattgctttgggtagtattgtcatcttaacaatactgatgtttccagttgatgaacacaggatgtcttcccacttacttatgtctttaatttcttttaacagtgttttgcggttttcagtgtacaaatctttcgttttctaagtttgttcctaagtattacattcttttctatgccattgtaaatgggattgtttttgtaatttactttttagattgttcattgtgagtgtatagaacataactgatttttgtatattgattttatatttgcaaccttggtgaatttgtttattatctctaacaggtttttttggtggaatctttagggattttcacatatgtcatctgggaacagagataattatacatctttacaagtttggatggcttttatttctttttcttgtccaattgctctggctagaacttccagtactacattgaatagaattagtaaaagtgggcatcattgtctttttcctcatattagaggaaaagctttcagtcttttctgggtttgtgttgttgtttggtgtgttttgtttgtttgtttgtttttgttttttgagatagggtctctgtgcagtggcataatcttgtctcactgcagccttgaactcctgagctcaagagatcctcccacctcatcttcctgagtagctgggaatataggcacacaccactatacccagatagttttggctttattttttgtagaaatggggttcgccatgttacccaggctggttttgaactcctgagctcatgcaatctgcctgcctcagtctcccaaagtgctgggattacagttttctgttttcttttatcatcattactgtgtaggtaatgtgtctttcttaagactacttttatgataattatcttatctttaaacttcagaaattttgttatactgtgtttttgtgtggttttctttacatgtatcttggttagggttcattaagattcttggaatttttgattagtattcttaaaaattggaaaatttggaaatttttcttcaaaaaacatttctgcttcaatctttcatcttctgtaactataacacttatattgtactgcttaatattttccagccagtcactgaggcccagtttgacttccagtctttttccactatgtagtgcaatttggttagtttctattgtcctgtcttcaaatttactgatcttttcttctgttggtgtccaattttctattaatcccttacagtatttatcattttagatactatatttttcagctctagaatttctatttagttctttaatatagtttccattattctgcagaaatttttgaaatgttcactcattttgtccatcttttttcttgaaatcttttaacatatttatagtcattatttataaacctacatcatttcagggcctatttctattgattattttgttattgtagttgttgtttcccttttacatacacatttaatgatttttttaaaattatactttaagttctggggtacatgtgcacaacgtgcaggtctgttacataggtatacatgtgccatgctggtttgctgcacctatcaactcatcatttacattaggtatttctcctaatgctatgcctcccctagccccccaccctctgatgggccctgggttgtgatgttccccgccctgtgtccaagtgttctcattgttcaactcccacttatgagtgagaacatgcggtgttaggttttctcttcttgtgttactttgctgataatgatggtttccagtttcatccatgtccctgcaaaggacatgaactcatccttttttatggctgtatagtattccatggtgtatatgtgccacattttctttatccagtctatcattgatgggcatttgggttggttccaagtctttgctgtcgtgaacactgccgcaataaacatgtgtgcctgtgtctttatagtagaatgatttataatcctttgggtacccagtaatgggattgctgggtcaaatggtatttctagttctagatccttgaggagtcaccacactgttttccacaatggttgaactactttacacttccaccaacaatgtaaaagcgttcatatttctccacatcctctccagcatctgttgtttcctgacattttaatgatcgccattctaactggcatgagatggtatctcattgtggttttgatttgcatttctctaatgaccagtgatgatgagcattttttcataagtttgttggctgcataaatgtcttcttttgagaagtgtctgttcatatccttcacccactttttgatggggctgttggttttttttctcataaatttgtttaagttctttgcagattctggatattagtcctttgtcagattgatagattgcaagcattttctcccattctgtaggttgcctgttcactctgatgatagtttcttttgctgtgcagtagctgtttagtttaattagatcccatatgtctattttgacttttgttacaattgcttttggtgttttagtcatgaagtctttgcccatgcctgcatcctgaatggtattgcctaggttttcttctagggtttttatagctttaggtcttacatttaagtctttaatttatcttgagttaacttttgtataaggtgtaaggaagggatccagtttcagctttctacatatggctagccagttcccagcaccatttattaaaaagggaatcctttccccattgcgtgtttttgtcaggtttgtcaaagatcagatggttgtagatatgtggggttgtttctgaggcctctgttctgttccattggtctatatatctgttttggtaccagtaccatgttgttttggttactgtacccttgttgtatagttaaaagtcaggtagcatgatacctctagctttgttctttttgcttaggattgtcttggctatgtgggctcctttttggttccatatgaaatttaaagtagttttttcgaattctgtgaagaaagccagtggtaccttgatgggtatagcattgaatctgtaaattactttgggcagtatgtttattttcacgatattgattcttcctgtccatgagcatggaatgttctttcgtttgttcgtgtcctcttttatttctttttgcagtggtttgtagttctccttgaagaggtccttcacatcccttgtaagttggattcctaggtattttattctctttgtagtaattgtgaatgggagttcactcaagatttggctctctgtttgtctgttattggtgtataagaatgcttgtgatttttgcatattgattttgtatcctgagactttgctgaagttgcttatcagcttaaggagattttgggctgagaccatggtactttcatgatacacaataatgtcatctgcaagcagagacaatttgacttcctcttttcctaattgaataccctttatttctttctcttgcccgattgccctgaccagagcttccagtactatgttgaataggagtggtgagagagggcatccttgtcttgtgccggtttttaaagggaatgcttccagtttttgcccattcagtatgatattggctgtaggtttgtcataaatagctcttattattttgagatacgttccataatacctagtttattgagagtttttagcatgaagggctgttgaattttgtcgaaggccttttctgcatctattgagataatcatgtggtttttgtcattggttctgtttatgtgatggattacatttattggtttgcatatgttgaaccagccttgcatcccagggatgaagccgacttgattgtggtggataagctttttgatgtgctgctggatttggtttgctagcattttattgaggatttttgcatcgatgttcatcatgggtattggcataacattttctttttttgttgtgtctctgccagtttttggtatcaggatgatactggcctcataaagtgagttaaggaggagtccctcattttctattgattggaatagtttcagaaggaatggtatgagctcctctttgtacctctggtagaattcggctatgaatctgtctggttctggactttttttggttggtaggctattattgccccaattttagaatccgttattggtctattcagagatttgacttcttcctggtttagttttgggagggtttatgtgttcaggaatttattcatttcttctagattttctagtttatttgcatagagttgtctatagtattctctgatagtagtttgtatttctgtttgatcagtggtgatatccactttattgttttttatttagtctatttgattcttctctcttctttgttagtcttgctagcagtctatctattttgttgatctttttaaaaaaccagcttctggattcattgatttatttttttgaagggtttttttgtgtctctgtttccttcaatcctgctctgatattagtcatttcttgccttctgctagcctttgaatttgtttgcttttgcttctctagttctttaaattgtgatgttagggtgtcagttttagctctttcctgctttctcttgtgggcatttagtgctataaatttccctctacacactgctttaaatgtgtcccagagattctggtacgttgtgtctttgttctcactggtttcaaagaacatccttatttctgccttcattttgttatttacccagtagtcattcaggaggaggttgttcagtttccatgtagttttgtagttttgagtgagtttcttaatcctgagttctaatttgattgtactatggtctgagagacagtttcttgtgatttctgttcttttacatttgctgaggagtgttttacttctaattatgtggtcaattttagaataagtgcgatgtggtgctgagaagaatgtatattctattgatttggggtggggagttctgtagatgtctattaggtctgctcggtgcagagctgagttcaggtcctggatatccttgttaattttctgtctcgttgatgtgtctaatattgacagtggtgtgttaaagtcttccagtgttattgtgtgggaggctaagtctctctgtaggtctctaagaacttgctttatgaatctgggtgctcctgtattgtgtgcatatacgtttaggatagttagctcttcttgttgaattgatccctttaccattatgtaatgcccttgtttgtctttttcgatctttgttggtttaaagtctgttttatcagagactaggattgtaacccctcctttttttttctttccatttgtttggtagatctttctctatccctttattttgagcctatgcatgtctttgcctgtgagatggatctcctgaattcagcacacaaatgggtcttgactctatccaatttgccagtctgtgtcttttaattggctcatttagcccatttacatttaaggttaatattgttatgtgtgaatttgatcctgtcattatgatgctagctggttattttgcctgttagttgatgcagtttcttcatagcgctgatggtcttcacaatttggcatgtttttgcagtgtctggtaccagttgttcctttccatgtttagtgcttccttcaggagttcttgttaaggcaggcctgatggtgacaaagatctctcagcatttgcttgtctgtaaaggattttatttctccttcacttatgaagcttaatttggctgggtatgaaattctgggttgaaagttcttttctttaagaatgttgaatattgacccctactctcttctggcttgtagggtttctgctgagagatctgctgttagtctgatgggcttccctttgtggttaactcgacctttttctctggctgcccttaacattttttcttcatttcaaccttcgtgaatcctacgattatgtgtcttggggtcgcttttcttgaggagtctctttgtggtgttctctgtatttcctcaacttgaatgttggcctgccttgctaggttggggaagttctcctggataatatcctgaagagtgttttccaacttgtttccattctccctatcactttcaggtacaccaatcaaacgtatatttggtcttttcacataatcgtatatttcttggaggctttgttcatttcttttcattcttttttctctaatcttgtcttcttgctttatttcattaatttcatcttcaatcactgatatcctttcttcagcttgatcgattcggctattgaagcttgtgtatgcttcacgaagttctcttgctgcatttttcagctctatcaggtcatgtaggtttttctctacactggttgttctagtcagcaatttgtctaaacttttttcaaggttcttagcttccttgttttgggttagaacatgctcttttagtttggaggagtttgttattacccaccttctaaagcctacttctgtcaatttgtcagactcattctccgtccagtttccttttcttgctggtgaggagttatgatcctttggaggagaagaggcattctggtttttgaattttcaccctttatgcactggtttctccccacctttgtggttttttctaccttcggtctttgatgttggtgacctatggatggggttttggtgtggatgtcgtttttgttgatgttgatggtattcctttctgtttgttagttttccttctaacagtcaggcctctcagctgcaggtcagttggagtttgctggaggtccactccagaccctgtctgcttgggtatcaccagcgaatgctgcagaacagcaaatattactacctgatccttcctctggaagcttcgtcccatagaggcacctgccagatgccagccagagttctcctctatgaggtgtctgtcggcccctactgggaggcgtctcctggtcaggctacacggcagtcagggacccacttgaggaggcagtctgtacattatcagagcttgaatgctgtgctgggagaaccactgctgtcttcagagctgtgaggcagggacgtttaagtctgctgaagctgtgcccacagctgccccttcccccaggtgctctgtcccaggggaatctgggatttatttgtaagtccctgactggggctgcttgccttttgttcggtgatgccctgcccatagaggtggaatctagagaggcagtcagccttgctgagctgtgatgggatcctcccagtttgaacttcccagcagcattgtttacactgtaaggataaaactgcctactcaagcctcagcaatggcggactccactcccaccaccaagctccagcatcccaggtcgatctcagactgctgcgctagccatgagaatttcaagccaatggatcttagctttcatgggcttcatgggcacgggacctgccaagccaggcaccgatgggaatctcctggactgccgattgcgaagaccatgggaaaaagcacagtatctgggcagaagtgtaccattcctccaggtacagtctgtcacagcttcccttggctaggaaagggaaattccccgaccccttgcacttccctggtaaggcagtgctgtgttctgcttcggctcgccctccgtggtctgcacccactgtccagccagtcccagtgagatgaaccaggtacctcagttggaaatgcagaaatcacccatcttctgcatcagtcttgctgggagctgcagaccagagcagttcctatttggccatcttgccagaaaatacagttaatgatttttaagtgtgtaattgatgttctgattgctttgttactgggagcctggattttactgtcttcctttatacagcatttagatttgtttcagcagtctactactgctgatcagcttaatccttttagtgattgatattaagcattgtatgggcagtcatagagttgctcttcttcttacgttttacctttcttgtgtctcaatttaatgcccagagtgttcagcaaaatctttactctgacttgttagaacttctcattacttgtcccacttcacagagtctcattgtagacaaagactgtgcagatttctgaaactccttttttgcttaactcctcttcagaactctgcctcagaaatgtcatttgactcagcatgcctgaatgccaatccctaccttttctgctctgtgagattgctttgttctgcttgggatttacctttctgtaccatagtctgatatgtgcccccatgcatgaagctgagacaattataggactgcatcttgagttttccttctttcagggaacacagtgctgtgctttctgttatcaggttgtccaatacctgaaaacagttgcttaaaataactttcctagttttatagtttgtaaaggcaagagtggtagtctgatcccattatggattgcagcaggatccatatactacactgtgacaattcttttgcaacagtggctttgttaatgaatctttactttttaaaccaacctttaaaaatgtgctcagttattgatgttctcaattctctttataaaacatacctactaacacccttgacatactacatatgtggcttaattaaggcttcattttagtatattgccagacttcagctttcagtcattgagtcgtatgctttatcaagactcagcgagcttacttccatacctgtctctgccagttatacttgacattgtaattcataatgtaactgagtgctataatctgcttatatgaggacaagagagtcctttctgtaacagttctgttgaatactttgagaagatgataaaggtgaatttctaatgatagtgttcaagacatggaaccccacaatatggtgacttggcatattgaatattttatgaagaaggcagaagcaaaaaggtcactgtgaccttccccactccctgtctcttatgaggtaagttgtaaaacctaggaaggattttttgacctttccctgaccatacaaccttatgtgagagttgccttacctatacattgaggaagataaaggatcacagagaagaatctgaacaaaaagccttgctaagtttctgcagtctattaccattagatcacacctcctttatcctatcatatttctgactacccactcttcatctagcctacgcataaaaacacacaggtttaactcttttttgggtcttcatttccgtatgaaggcttctgtgtcacataaaacttatattaaataaatttgtatgcttttctcttgttaatccgtcttttgttttgggaccctcaaccatgaacccaagatgggtagaagaaaagatattttgtctccttcatactaataattcctgtcaaagtatgttgagtaaggcaattgtaaaaagattgtgtgtggtgtaaaaggaaatcattaaattctaggcagattttggactcagattatttcacaaacatttttatattctcacttcacatttacaaaactgaaactataaattgtagatggtgtattttcttgatggtttatggaaaaaacaccacttgggattttgataaatggacctatactcaaaaggtattgcccaaatcagattattaaaagaatacacgtgtacattcttgcattataatataatgtttaaggtttgtgtatattgcttacttaagtgtttccctggttttactagtatgttcaggcaactgagctaggaccagttcttaacaacagaaaggaaacttctgttgcatagttttttattcttatgctaaattgacaaggaatccccttacacttttttaatatgccttcttgcaatctagtttgacttgcacatcattgcctcatgaatatttcattattaaatctgaagcgttcagttttcaatccattattttctcttatttccagtgtccttttcagatgtaattaagttcctttattgcttaaaaccattgcttgattttaggaaatttatgttctggccctttgtcctgatatttgtttatttaagaattatttcatctttagttctttactgccataccttttgttttcataactcttaatgtatgctatgtgttctttagcctttttaatttattaccaggagatgaagagtactgtttaattaagaaataatagattggttctgttctgttctgttctttctttgcttccctttcttttccttcccttccccctccttcctctccctcttccctttttccttccctgtgggtcttgctttattgcccaggctggtctcagatttcctgtgctcaaacagttcatttgcctcagccttctaagtagctgggattacaggcatatgccaccttatctggtttagactggttcttttcaaaaggtaatgttatataagttccaggtaccttagggccagactttttttttttcaccttttattatagcttctgaaaagctgccaggtatcctaagataggtacatgacttgatgatttaaaaatctgaaaaatctggctgggtgtggtggctcacacctgtaatcctagcactttgggaggccgaggcgggtaaatcaccttgaggtcaagcgttcgagaccagcctggccaacatggtgaaaccccatcactactaaaaatgtaaaaattagctaggcgaggtggcaggcacctgtaatcccagctacttggaaggctgaggtgggagaattgcttgaagccaggaggcggtggttgcagtgagctgagatcacgccattgcactccagactgggcaacagagcaaaaactctgttaaataaataaataaataaataaataaccaaccaaccaaccaaaaaatccatccagacatggtggctcatgcctgtaatcccagctactcagcaggctgaggcgggtggattgctggagttcgagaccagcctaggcaacatggtgaaaccccatctctacaaaaaaaaaaaaatgcaaaaaattagccaggcagggaggcatgtgcctgtagtcttagctactcaggaggctgaggtggtatgatcacctgagcccagaaactcaaggttgcagtaagccatgatcatgccactgcaccctaacctgggtgatggagtgagatcctttctcaaaataaataaataagtaaaaataaaaaagaatcctgaagtattgggttaaaaagcaaatccattaagctgccaaaaagttgaaattattaaatgttatacttttgtaattctaagtattaaaaaatgtattagtttaataattttcaaaatgcttctgttaaacatactggttttcatctaggcattgatccttcatttcttcgttaagcatatttttcaacgatttcagttgttccaaagtttgaacttagaaaacaaagatttttaagttttccttataaaaatgcaaaaaggtgttctaatagatttttcttatttgggggaaaaattgtatcttatatcatttttctaaaattgcatttcatcataaaatagtttcttagtagacttgatttggttatgtcatatgtcaaatcatatactactattagggagaaaatcttttgaatacccgttgcaaagtttatggctgacactgctataacaaaagacagattaacaagaaaaaaatgtaacaaatgttttacttattatttattttttaaagagatggggtctcactgtgtggccctgactggtctcaaactcctggtttcaagcagtcctcccacttcagcctccctaggagctggtattacagatgcatgccactgtatccagctaacagattttttaaaaaaccagttttacaggcagtggcagtctgatagattttcctggtttgcagtctgaatgtcacaaaggttgtctacacatgagttgtgatttctctgaagtttctatcaatttatccagccacagtttgtaagacttcaggaaaagggaagttttaattttagtaattccaagtcaaagaaacttgggagaaaattggaaacattagtttggagagctgtagctagatattagaagaaaccggaagaattcaggattcatttcagtttgtaggtaaataacaaaacttcaaaaacaatgtgctgggatctaataataggtgcactgtagttttcttctaaaatgtaatttttctttctacagtcattctcatttttatcaaagataatcaaactaatttgtttgcaaaacaagtttaatcttattaaacttagtgatatggttcggatctgtgttcttaccaaatctgacgtggagatgtaatccccgacattggaggtggagcctgttgggaggtaattggatcatcatggtggttggtccttctcgaataggttagcaccatcctgtctgtgctgttcttgtaatagtaaatgagttatcatgagatctggttttttaaaagtatgtcgcatctgcccccttctctcttccttcagccacgtgaagatgcctgctctggctttgctgtaaaaagtaaaagctctctgaggcctccccagccatgcttcttgtacagcctgccaaactgtgagccaattaaacctcttttctttataaaatacccagtttcaggtattactttacagcaatgtgagaacaggctaatacacttaacctgattatttacattatgtgcagcataggctctttttaagtctgctttgctggaacttttcataaggagtctcagattggatttgtaaaagcctctcgagactagaaggccaagccaaggactcttcataagactttgcattcgtagagatgaggtgaattcctgtttgaggtccccaagtatcctgaggttcctaggccttccaagaagtagcattccttactcacctagctgtaaggcaaccatacaaccatgtattcaagttaccaggccagtttttttacccctaaggggcttttattggctccataaagtcaaacttagtttcttaaagttatttggttgtatttgaaaataagacattctagtcaaagccttggtaatataagcagtaaatacacaatttcctgttacaagaacagattcttcctgaacttgtacaagtaactatattgtataaaaataagaatacttgcttatagttcctggattctagaaggattatgcagggggagaattttttccatttttgtttataaaagtatactttgccaaattgctgtaagctgtatagatagcttaaaagaaaagaaaaaagaatttccttaaatctggaaaacaaaacattaaagacccacaatgtttcaaacaacaaaaaaaaattatcctcattagttcattcaccctcatgtaattcttgttctgcttgattttgatgagcagtttcacgaacccattagtttcttcattcgagttctggaaattcttatgcagtccaatggtataatctgaaagttaccagaaatctgtgttacagagtacttgtcagtctttttcattaatccccttgaagatgaggcaacttagactattgctcactgcaaacactttgagagaagaatcaaaatatatagtaactgtcttatgaatgacagaagatttaaaatggccgtggttaaaagtctgatgagcgttcattattataatgatgcagttggcaaggaagttcggcagttttttggtatacaaaatgttaacatactagccagaattatgactgatagcattacaccagaacatatcagaatttttgaaatgtcaatttatggaacactcattaataatatactcatagataataattttgagaagtctaaacatcacttattatttgacagttcttcccatataatttaacttatcaaatgagcctaattaatatctccaacagattgagagacaaatcctttgagactttccagggaccctctggaaagttccaaaatcagaggtttaaaagacataatttagaattttactttaagaagtaaaaaatgtcaaaaggtttaaagcatttgattaaataggcccatagggcactgtgaaatattaccaaagtgacaaaagattttaaaggcaaacacagaaaactacatagttacaaatatgtggagctaaataatgagaacaaatggacacaaagaggggaacaacagacactggggcctacttgaggtaggagggtgggagaaggtagagggttagaaaaaaataactatcaggtactatgcttagtacctgggtgatgaaataattgtccaccagactcccatgatatgagtttacctatataacaaacttgcacttgtatccctgaatctaaaataaaagttaaaaaaaaattatcttgataaaacacaaaatctttgtttatttggccagttacttaacagataaaggaaaaccttcactttcttaaaccagtactccaggaaaactttgtcattttaacagagaagaccaaatttctagttttgcatcagtgtactattaatactatagctatagctaatgttaataaaactatgtaaatgaattcattcagtctcagccatctttgaccacatgagataagatttttttcccccaagattccttttccataagccttttttagtcttgaaacaaatatccaactgctttctcttcctgcttttttctcttattctggcaaaccagttattttactttagcacagaattaatttactctcttttttcccataatggaaaatataccctcatgctttagaacttctcttaccaaaaaatacatcctttattgcattttttttgtataaaagttgtttctcttcacccttcttaatttcttgtagcttaaactatatatatatattagaattttaatacttagcaattgtgaattgtcatgtaataatattctgtagattaatactattatgatttctagaaacatgcttccttatagtacaatttctcatttttattaacagaccaaatatgtttagctactctatagtgtataaaagcaatattccaaaagtatataaattcaaatttatgttcagcaattaatgtttcagcattttattttactaagaaatgacctagacatttaatgaatatctgttacttaatcttacttaagtataactttaaggttgcaagttaccaaaaagattttggaacctctttttaagttgacatcttgtataaaatgttattattgaagagttcacttacaaatttttactccagttatatttatttaacttgttctcaacaattaaactgctcatgacaacttcttgagacattaaacaaagctaagcatcattttatttttcttgtttaaaaatcaggcagttataaaaaatatcacagaagcaaagaaactaaaaagttaaactttgtttaaacttgtttcttcctctctctttttttcttttgataacagttacctccctgaagtttgtatttctaaaagataactattgagttcaagagaagacaggtaggaaatttacatctcaaaggcacagaaaaagaatgtaagttttttccagggaggagttttataacatatttgcctattatcaaatatttttcttatggaggctgtggatgaaatttttaggtgagttagtgactgaggaaacatctagcagttgtcttaccccagagtccatctaagtgaacaaaacatccatttctgttttcagatagtttttttttttcctcttctcagcattacgtggttgcttttgggagaccttgaatcccttgagagtaggggtacttaaagttcaaattactgaggggctgaagtggaaagtgaaggattctggcaggggtagacggaaggatgttaaagtaggaacttgaaggggaacatatcaagattcaaagttactttatggaatatcaaaaggaggaaaggggagcagaagaaaatggaagaaaaaggtccagaaggaagaggaaggagccagtgtgggcagtatcttggtccatttgtgttgctgtaaaggaatacctgagactggataatttataaagaaaagaaatatatttggtttatggttctgtaggctgtgcaagaagcatggtgccatcatatgcttctgatgaggccttcaggctgattctactcatggcagaaggtgaaggtgaaccgacttgtgcagagattacatggtgatagaggaggcaagagagagagaatgtgtcaggctcttttaaacaaccagctcttggaggaactcttgcagaaactaatagagcaagaactcacccattaccacaagggcagcaccagaccatttgtgagggatctgctccaatgacccaaaaacctcccgttaggccccacttccaacattggggatcaaattttaacatgaaatttggaggagatagccctttccaaagataggcaaaaagaaagaaaagactttgttgctatagtggttatggatctccagtttcccatggaatatgacatgcctgtaatcacacacacattaatctgtgacattaaccatatgactgaccagctaaggttgagatgacagaatccccttaaagaccgggacctttattacaaacttccctgagagctggtgtggttggacagagaatgtcctttaaaaaaatgtttgttattttcttgaggacagagatcatgttttcactgttgctcattgtgttcagtgtctaatatgtagtaagtgctaaaaaatacgttgaataaatgagaaacattctttttgttgccgaaggtaaccacttcacatatgttatttagtactcattttggtatagcaaactgatttcatacatgatgaaaaaggagtctattaatttgcccaaagttgagaactgggattccaacccagttttgactcagccctttgcttttagccaaggctttcctgctcagaaggatctaggagtggtaaaaatagtttgtgagattgaaaaacatgtctctaattattagttttgtactccttgtatgattagtagcatcatttgcatgaactatttctatcatattatccacagcagttcattcaaactacacttttggctcaatgatagttttgcccagtatgcaaaatataacagatgtcacattccaacacttgattcattgcctggttggactccaacatcaatttgttactttaacaaacaaacaaaagttggttctaatggcacaactcaaatttatttttatgttttttattgtatctgaatctatatggcccctaagtttttagaagtgtttaagttcttccacagtaagtaaatagatatgataatgctatctgccaactctttatattttttaaactgtaaaatttattttgtaaaatgtccttatttatgaaacctttaatgagtttcttgctttaagtatctgtgggttagttgaaagaaagtttttattacaggtctaagacttgcttttctttgaacatcttttatggttgaaatagaatgtaaactcagtcatcaaatttagattagttttagctgtaaataactaatagtctgcggtagaacaagtttctataaacagtatttttaatgtttcaatatgtgctctactaaaactgttcagcattgatccatactaacatgcaatttagtgaacttactaggaaaagcatgataaaagttttggcttttctgggcgtactgagagatctagcaaaaatgcatcccaaagtgcaaaaaccttacatttatttctcttcatgacaagtgtaaactgttaaggttaagtgggtggggcaaccggaagtaattactaaggccagtggcatttttgtggtttaataaaggcagaagctaattattcagtttttatttaagtgaaatggtgccaaaaaggaggttcctgtggagcagctgcactccttcagtgttgccctaatttaccaaagacacaactgtcacaaacaaaacttttaaacttgatatatagccacaaaagtaaggaggcttttgttgggagtgcatgcagaagaactcctttatacaaatcaaccggcagatgacggacaatgatgaaaatttgattctttgaagtcataatagtcattgaaatgtgtgaaattctggtattgaaaagagagcggccagcaagactctaaatcctgggtggttgcaagaagcttgctgggaggtttttctgcattttgacaccaacttcccattgcttgttccctgcttcctttgttaaagaaaaaaaaagttgaaatcacagaagataaatggagacagttgataaccgaatcatacagttttaatatggaaaactagtattttatcatggaaattggtatttgaaagaataaagttcatatacatatactggtacattcatagtgattttttaaattttctcttcatttatgtagacttgtgaaatggcaggtcagctatcatctcctccaaaatttaaaattgttgaagatatggtgttgaaagaatgaactttggaattatgacatgcatctttccaatagcaaattttgacttgaatgcccttaatctgtgaattatcattgacttattagttatcatttattaaaatagcatattgcacataaggttgtatttctgaaactttattaggataatgacattaataatggaagcataggtttcatacttgacccaactattcaacaattaagttttaaaattcaataaatctgtgtatattacttatagagtagcttgttttattagaatttacagataattattaactggtgagtcttgaggttcttcaggtgccagcttgaaggcttttcatacctatgtgatttagttttttgaattattatttataaattatttatctctattttaccagtaaaataagaaatttgtaaaaggcaatagtgacatctttctccaaagcatttctagcttttctaaataggtttcaaaaactcacaggtgatccatattgccatacaaaagtagaaatccataaagaatacaattagttcaatataatttaaatagtttgcggattttaaatttttttgtgaaagttagatctcaggtagctccgtgtgaatttagagggaaccacacaaagcgttgaagacacaagtagagttcagcatagtgcctcatagttcttttcaagtgttacattgttttaatggaatcttggagtgggagctttagcccattgaaatgtgcttaaagaacaggttcttctgtcactagccgaagctgtgtggatgaaatgataacaatagggtgtcgtgatgcatttttaaagtgtgagaaatcaggttgtctagactgagagtgtgcctacagggactaggaattttagagcctctgtaccctttaggtgtcaagtatatgagagatgccaagcctctttattctgtctttggcagcagctcaattgggctgtagtaccttacatgtcttctgcatgcaaaaactgattctgtgtcatgacaacttgggttcccaaaatcagaaacccacttgttcaaatgccaactttaaattagggtaagataccaataaataattgctgtaattcgagaagacatggaagattggtagttatgagttcaaaatataaatagcttagcaacattgtgtagacactttttaaaaaaggttttctatatactgtcctttctactttgtagctcaaatactgttttatagtataaatcaagaaatactatttcaatttttttcaaaacttgaaaaagtttaaaatcttaagttttttaatcactttggcatatatgcatcacagtatagaagtaggtaaagtaaaagtgtttcctctaatcttcctgaggtaaccagtgttaagagtttaatgtgtttcctttcatatagttttaaaaatagacataacttacagctccagcttttatgagctcagctcagaacagaggggatgctttggaatttggaaaagatgccccaccccataattctataacatgcttatagtgtttgtttatacccagcttaagctgtagctgaggaaacgagacagattaatctaaagatatataatattaaataataaactactatggcagattgcaagtattacagtgaattcaaaggaggaattaaacattgaggacttcccaggagttgagccactttaagctcttaaatagagaatatatgcttcaggaagtcattaaatataataatacttaaactttttttgaagttgaacctgaatattagaaattaccaattaaagtatttcacacctttaaaaattatgtgccagcttcactcatttttactttaaactagatgtagggaaactttaaaaataagtaaatgtaggcacatattagaagtgcatatttgtgtaaatatttatatggataattttgatagtttctgtaaacaagctgtgacaaagtagccacacctaattattgacgcaggtggaaaggtattgtgttaaatagaggattggttgccaactaaaataactttaaagaattggtttttaatcttgtggatagagataatagtcaagtcagaaatgtgtttcgtgtttttcccactagtacgtactagctaagaatacttaccagctaagtattcttgccagttatttggttcatagcattgatagattgaaactacaaataaacattagtcttcattagggtgtgtattataatgacataaaaattcacagacgttttctagttttcacaaatttggtataatcatttttatattaactcttgtttttaccaagttatccaaaatttacgttagtaagtgaaccatgattttaaaatgcttcattaataagcatatggttgaccccaatgtgatttactttgatcagataaagtattttaccattactaaatggagatttaacccatttatgtctgaggttgcagtttttagaatttttgcaatcagaccttggcaatggccttgagcagtaggatataaataactcccacatgcttagcattccaataatggaacactaggaataaataagttttaaactctgaattactttactaatttgtgtcctgactgctactatgttttgataaatgtatctactctggggcatcaaaattctgtgcattttcaaaatgagcatttgttactggataaaattatagaaaaatcgagttaaagttaccattgttttcatctcacattttggcaaaaattatgccactttttgggattacttttgcagaatgtgtttgattgtatcattctctctttagtaggtttcaccaaaggggggagatacatcacaatgctaattaaagttgttaaatttacaactttacaaaaaggttcaggtttccctctcaaggtaatgccttgtgggtaagcaatttgacacagaaattataagtaacagattgtcttctatttaagatttaaataaacatgcaaataaggatttactttttatatccccttttcatatttcctttgtattttttctcctctgactagttcgcacttgctcacaaagtaagagcattgttgactacaggctcttctgcgagcaaacagtctcttcagaaaataccaatgctttgttggacaaaagggcgtaaattttttttacgatccttttccactgtctccactacgtccccctaaataaaccatttacaggtatctaaatagtaatttacattgtaaagtatcagaatggtagtgaaataagccagaaaatttatctcaatttatgaacaaatctgaatagagttgcatgaatataggaaacaacaaaagtacattagtgtgtatgtaggctgtttgaaacgtgtttttttttcttgtttttctgtaggatatcactactttaactggagttccagaagagcatataaaaactagaaaagtcaggatctttgttcctgctcgcaataacatgcagtctggagtaaacaacacaaagaaatggaagatggagtttgataccagagagcgatgggaaaatcctttgatgggttgggcatcaacgtgagtactttattttaatgtgaatattgtcagctatctttttctatgtagatctttcttctaaatatgattttcaaactcttttatgtacaatatgcttatgacagtactttttgacgctgttaagtaccactgtgctcaaagatacacattatatatttagatattcagataagtgtggcttagcacagtaaactatgacatagtctttttcagagtactacttactagataaaaatgactgaatttcagagcactgttatggaactcaaagctatgtatacagcagtccccccttatctgcagttttgctttctacggtttcagttatccgatggacagtacaataagatatttcgagatagagagagactacccttaatataacttttcttatagtatgtaagtgttataattgttcaattttattacaacttattgttaatttcttactatgcctaatttataagttaatcataggtctatgtgtttaggaaaatataggatttgatactattcgtggttttaagcatccactaggggttttggaacttgtcccccctcagataagggggaatactgttttatccaagatactgtaagaatggtgtttataatatagtgacactttaacttgttttaaaattacaataaacttctttgtaatatatattatatatatatcttttttctttgtaaggggggtaggaactaggtcaatttagaaattagctaacttgagggaaacttataagttcctgagatattgtgattaataataaataataataaattacttttaatttttatttattattttctttagagatgtggtcttgcccccttgcccaggctggagtgcagtgatgtgatcctagctcactgcagccctgaactctgggatgatcaagcggtcctcccaccttaatcccccaagtagctgggaatataggtgcatgccacagcacctggccaatttttttttatctttttgtagaaatggagtctcgctttgttgcccgggctggtctcgaactccgggcttcaagcgatccacccacctcagcctcgaaagtactgagattacaggtgtgagccaccatgcctggccattaaattgctttttaacagtgtattggaataaattcttgtggtactaatgaagtcagtgacctaattctccataatggaatagggcccaaatgttaagtaggagggctgattctagttaaatttaaaaagctgtcattagagaaaacattaggcagataagctagaaaattgtcattcgtattgaaactctgagaacattatgtccggtctccagttgaaggtagttataaacttaaattagaaaatgtagactgtcttgttctagaaaagtataatattcaacatcattgcctgttgattacttgggagactttttttagaaaacatctgtcatgttgcagtttaaatagaattatattttattaggcaaatgatatataggcacaatttcttagtttttttcttatgttgcagtttaattaatttattaaaatgagaaaaaagtcaaacaatacaaattcaattagaacatcacaaaaatacaaatgtacttccacagatctacaaatttgttataagattagttataattcagtgtgttataaaattaagagaaccaaaatgaaacactttgctaagaatattctgctttatcaaaccacctaggtagagtcttgagcactcactggtaataaagctgagaaatagatacttacccaacttagtctttggagtgaatctgtatatgtgagatgagccgccatgtcatggttataaggaagggatggaatcggctcatgtccctcaaagcccataattgtcatgtctcctgtagtagtagtacaagacctggcctggaaattgttagaaaggggaactaccaaacagaaaactgaatctacccagtttctggaaaacaacagatggaggaacatttggcttccaaactttttcatatgtaagataattttcctaagtaatcttgctctaatgggttgtatattctcagtacttgtcaagaaaacagaagtctcccattaactctagcttcaaagaataaataccaggtcagatttcccaatgcaccttattgtttcaagagattcctggtggtgcctgcatctgtaagaatggtcatatacagacaaaatcagtggttctcaactgagggtgcttttgtatccttaaaacatttgccagtgtgtggagacattcctggttgtaataagtggtggcttctgctgacatctagttaataatggcaatactatgagacacaggactgccctcctttgcaaccaagaaaaaattttctggccccccaaaagtggaagatgctgaggattaaaagccccagtatcaaggagaatactttgagaccatttttttttccttacaaaaacacaatatccccaccaatgtgagatgttggatcacatttttgtacaagggtggttgtggtaggtagaattctaagatgccccaggatatctgcttctttgttacaactctaatcatcctcttccataaggtatggctacatctgtgacttgttctagacaattgattatggcaaaggtgaggggatgctctctggcaattacttttccttatatcagaaacaataggaatctatattttctttctatcttgtgtttgttttcataataaagtgatctagagtatccccctgttcatggaaattttgccctttagtctaaggcccttcatacataattgaatattgttcttttttaaattttagatccagggtgtacatgtgcaggtttgttacatgaatatattgggtgatgctggggtttgggcttctagtgaactcatcacccaaattaagtaaacacagtgcccagcaggcagtttttcaactcttgcccccttctccctctcccctctattggagttcccagtgtttattgtttccatctttacgtccatgtgtacccattgttcagctttcacaaatgagaacatgcagtctttgattttctgtttctgcattaattcacttaggatgatggcctccaccttcatccatgttgccacagaggacatgatttgattcttttttattgctgcgtagtattccatgatgtttatgtaccacatttctttatccaatccattgttgatggacacttaggttgattccttgactttgctattgtgaatggtttctttttgataaaatgagttatttttctttgggtagataccaagtagtgagactgctaggtcaaatggtagttctgtttttagttctttgagaaatctccatactgtattccataggggttgaattgctttacattcccaccattagggtataagcatttccttttctctgcatccttgccaacaatagccattctgactggtatgaaatggtatttcatggtagttttgatttgcatttctgtgatgattagtgctgttgagcatttttcgtgttcattggccatttgtatgttttcttttgaagagtaggtgttgtgttatcctttttattttatgtttcatataatatatagagtcattttgtaaaccacatgcttctagaagctgaaggaatttataaggaaaaaatttgtcccgatccagtgattgaaatgttaatgattactgtttttcaatcacatgagatttttacatgttcatctattccccagactcaccgtagtaatacattcccagcaacattcagtaataaatgattatttgagtacttgtgccttgtatacgctaaattgttgatgagtaaaatactttatataagaatatacatttgagtggtatagaggagaaaaagtaatatcttcctcacatctattgcaaggtttgtggctgagacatctataacaaaagatagtttaacaagagactagcatacaatttcattttgtgtaagttttatgtgatacaggagacttcagaaatgaagacccaaagaaacagggaaatctgtgtatttttgggcttagttttgatgaagagtggacagtcatacagaaagatggttggacaaagtttatgatctaatgattataaactaggaagaacttagccagacctgtttgttcagattcttgtctgtgtctctgtcttcagaaataaggacattccattccttctgttatagggtagacagttctggaatgagggtcttaggactgacttcagaaggtcagataattctgttatgtcctacttcaggggagagtgtcagagagaccttcctgcttctgctgttttctcaaatgccaagctgccatattttggggatagtgtgtcctggaagcgcattagtggattgtttaaataaatacagttttactttgctgtgcttgcacaaaggttcacacaatcattattatagtattgcttagtctggaaatagcatattaaatgttgaaatatgtagtgatttaatactctgatgctttaagacaaaactgtaacctattgtgcataaatatggaaatgctgtttttattacatattgattgaaaatgagatatactatatgtttgggaggtaaagttctttttcaaaacgtagttttgccgaagtaaaaagttttttgaagcaatagaccttgtctgcaattggtttatctgagacattgttttgaatcttgaataattttaaaaaacattcattaattctttttgttctggtgttaacaaccagtagcatgaaaaaatataagaataaaattattatttaaaatatttacttatttgatttgattagaacagagaattgctactctttttttagcattttaatgacacaaaaatagtatgtaattttactgcttggacatattgaattctgacttctctttgtgaaatattttaaatctttttctaaaattgttagaattgtaagctgaaggtttttcatgatcatctaattaaattttatcacttaactaagaaataaacctgtgtcccagataaattaatgagttgaccatagtttgggttctcagcctgcttatattttattttacaactatatataaaatactaatatgtagaatattaaaaatataaaatatttaaaacctggctagataagtccatatagacttgtattttttttaatcaggagaattactgtatttaatggagcaaagagaatgttaatattttaatgtgttttttgctgtgggtcaaagaatgattttaggatgtgctaaaagagaaatgactatccatcctatacctagaatatatttgtttccaaagccacaaggtttcctaatttaggggatcttgggcttaactttattctttttttttttttttttgagatggagtctcactctgtcgctcaggctggagtgcagtgggcgatctcggctcactgcaagctccgcctcccgggttcatgccattcttctgcctcagcctcccaagtacctgggactacaggcacctgcaccacgcccggctaattttttttgtatttttagtagagatggggtttcaccgtgttagccaggatggtctcgatctcttgacctcgtgatccgcctgcctaggcctcccaaagtgctgggattacaggcgtgggccaccgtgcccggccaactttattcatttcttctgatagatactgtctaggtctatcatattgatggaatggcttggagggtttaacagacatctaaccctgctgatgtaagagtattacagagggttggaagtgtgcagtataagaaatatgacaaatgtaacacctgcagagattatttttatatacctttggaagggttttttttttctttttttgctatcttgctgttaaatacacaggaaaggacatatttcattgagcagcagaggcagtgctaatggaaaaggtaattttacaaagttacagtaattttttaattttacagtaattttacagtaatttcacagtaattttgtgacagaaatttgaaatcttaaatgttttcccatatgttttcctcagtggggattgaggggaaggatcctcattgtgaaaatgggcttcatgactgtaaacatggttttattttttaaaaatatagtgaatacatttcattgttatctgcttatctacagtattttttgaaaggccactttggttcacatgtaggattttaagataaatgtgtttgatctttgtttttagatttctaaattcatattttaaagtactatatttacatttcttttctcatccaaagtggagcttttcttatgctcttttaattacctgagtctttaaatgttagaactcaaaggtaaaagatttatctttgtgtaaatatgaaaaatatcttaaggtgcaaaattatcctttgggtttgacccaagtgtttttactttttaaatctccttgatcctgtttcagggagacagcatgacttatccttgtttaatattgtagcaagttgccaaagataactattggttattaatctcttttttttttttacaatcttttatcttttaggttagtaaatgcttacttttcatttatttctgtaagcaggactttaattttgattaaacctaaaaatgatttatttttcctcagctgtattaatgtacattggtcattgaaactcagtgatcattggactcagtactttttgtgttaatcacattctgaaaatgtgacttctgtgttaaattttaaaaatgttttttttgttagaaaattatgaatctgtcattcagcttctggaaacaaggatttgttccatgtcattgtggacatagaaggtcaaatagtttaagcagacatgtgcacaaacgtagatgttgcgaattctctcatcacttgatcctcaagccttaagtcatcaaagtggacatcttaggttggcagatagttcttttgattatgagtaagtagcaaacagaagcattgcctgtatcatctttcccctttacactgttctaacacattgccaaagcacttctaaaatttgctttaatcaggtggttcagtttttttaattgaatttaaataagaattctgtctacttttcatctcattactgacttttgaacaagtaaatgactgtgcttgcattgtagatttaaactatagatacatgtttccatatataacatataagcgaggaatgttaccagttactccttttcctcccctgcttactaccctctcaccagtatacccgccctccctccatagaagcccccacaacaatttggtatatatccttccagacttttttcagtgtatgtatatgcatatatttaagtttatatgtcctttggtgaaatgtcatgattttcttagtataagtttttcacatttcttattaaaattatgcctagatattttagttttatcactatttcagatgaagtttcttcattacattttctagttgagtattgctaatatttaaagttgattttgcatataagccacattatgtactgtctctttagttgtcatggtttttcaagggattcactttgattttctagttatataatctaacaatagtggcagtttgttttctccttatagccaatttctctttcttgccttgttgcattggctagaatttgcaaagttgagtatcattcatgatattcaacatccttattccctttttcttctttagcagaaatgtttctgatataataaaatggacaaagttcttttctaatcttgatctaccaataattaaaaaaaatcaggaatgggtattaagtattaatgtttttgtaacatctgttgaagggcattttctgtagtgaatttcagttacctattttctgatccaattatatgttttataattggatatgtatttactatttttaagtaatatgtatttgttaatatgtatttaacatttttgcatccacccaatctgtggaattggcctgatgcagggtggagggagtgtgcacacataacttctatagcagaatataatttttttttgctcagctatttggcatttcttacctcagaaatattttaaaataacaaaagtgtttattaaaatattggttttaatattacatattttttctctacggtcttcattatgtatatctcctatttgcagaaagatgaccacctgatatttctgaatggtgctaatcaaactaacagcatttagagccacttataactgctactgatacttaaactaaaaaataaacaaataagctaagcttcccgagaagaaactcattcacttgccgttctgtgccattcagagggcatctaattaaaattctcagtgccaaaatgtttcaccaataccttttatgcatgaatagttctcttaggtaaatcaagagtcagttataatgctaatttttacattgtattgatacttagatctgttttgaataatattaaataggctttgctcataagcagaaaatgatcattgaaattcacaaatggtaagtatcttcacaaagtctgttttatggtgtagaacaaaaagcaatctgccaaccaatgttggacattataattatgaaacaatttttgatattttattggtttactgatgttcattagtgtctagtaaagtatatgaaaatgatattggaggaaaaatatctaaaatcaaccttggaaatgtgtacaacgtattattttgccaggcttaatattgctttttaaactttattgaaatatacattaagaaaagtatacagatcagaagcatacagcttcatgaatttttacaaccggaacacacatgcatgtgagtagtacccagatggagaaacagcatttccagtatctcagaagttcccatttcatcccatgcttttttcagatttcagccttccagaggtaaccaccgttctgacttctaacaacatagattagttttgcctatttttttttttttttttttacttaaagagaatcatcctttatgtgctcttttgtgactggcttttttgcttaactttgtgagattcatccattccatgctatttattgatggttatttgtgtaaatttctgtttgggtttttatgtataatacagtactaaaatgaagaatctcgtatatatcttttagtggatatgtggctttctaatatgctaattagtccctgaaatattagtcactagttaatattcaaacaattaatatagagataacaataatctattaattatctgatcccttatgtttctcaagttaatgacagtagcaacttgataagttttgttccaacagacagttaaattactgatagatccaccttgaacttgtggaggattatgcatcattggagtggatctgtttcagttttagccttagtcttggaacctagtgttaaaaaataaaaaggcacggcctttctgaagttttgatggaaagcacaaggtgtttacccacattctcccttcagactcagtctcccctgtaacaggcagctgctgaaatctttgctcaattctttcagccttcccagcttcattttgaaaccttgctgaatcatgtacagttcaaaagctccctgctctgtggatactctcttccagctgctctggcaatcctggactccgtctccaggctccttgcactgagattacggctttctgcttgagttctcgatgctcctagcttgtctagactagagaataccttatgggaaacaccgtataaagttggatctaaatccaactttagattggttccttttttttaaagattgaattctctagaagtttattttttttttctattagtcactctctggtctctgaaaattatttttctgttttgtccagagtttatagttaggcagataaatctgatataatattctgccattacccaaattggaacttcagtaattgagaaatgagcaaataaagtctaaaaataaaagaacaaattatctttagtggaccaggttgaaagagagattgtatacagttggaggagggtaggatatgaaagacttcatggaataggttggtattcaaagtgaagcatgagggattatttggatggacttccatgtgcagagagtaggagagcatttcaagaggaaggaacaaattgaactgatgggaaagtacaccttgcatttataaaaacaattagcaacctgatttgactagttggttacttctcaggggagtaattaaaaagaaggctagaaagtagttctgtccatattatagaagtgcttaaatgccaaggtagaagactgaagttaatgtgatagacagtgaaaactgtttgaaatttttgaactgggcagagagtgagtttgggatttgaactttaggaagacatcttggtgaagggtggattggagtcaaggaggcagaaagattagttaggatggggttatgggaataatgaaaaagagcttaaactggtggtgacagcatacctaaaaaagaactacaaaatacaggaaatgaaggagaatgagaagggtagaaactgaatggctggaagaatagtggcttcttccagtggatgaatgttgttactattggatatattggatataagttgttactatttgatttctatatgtatgtattcataaataaagtgaggataataataaaggctataccatctttgcaggaaacagagttctgatctcctggcttctgtcttgtttcttattctcaactaagccaatgtgcctgtcaacacttatcagattactgcatcatatttatgttgatacttctgttctcagtatatatactttaactatcaactggaaaatcgtgtgcgctttgaaaaggaggaaccaatataaaattatgatattattagtactaatatagccagccatatgaagctcttttgcttacaaagggtaggggtgggttatgataagaatatatataattataggaatctcagagtagcaaccatggtctgtgaccagaacattggcagcagtaattagtgggtcttcccgtcagtgagaggtactccccatttattctcttctttctatatctcatatctttccccatccaaattaccttttgaatcctcctttctatattttttacttccacatttctaagcaatgtttcatagaatgctatattcacctctgagagattcacaataaacatttgtagcaaacagtgttccaccttgttataagaataaaagtggggtgggcacagtggctcaaacctgtaataccagcactttgggaggctgaggcaggtagatcacttgaggtcaggagttcgagaccagcctggccaacatagtgaaaccccatctctactaaaaatacacaaattagccaggtatggtggtgcatacctctaatcccagctacttgggaggctgaggcacgagaattgcttgaacctgggaggcagaggttgcagtgagcccagatcacgccactgtactccagcctgggcgacagagtgagagtccatctcaaaaaaaaaaaaaaaaaagaataaaagtgacatttcttgaagttggatttcctaaagagcctatgtagatttgtaaacattaacactgtcctacattgaagaattcaattggatgtcagatcttagagctttatttttttatgctttaaaagaatattgttaatgatggaaggtttgtcaggagtgagcgatcttcaaaaaggagactcagaagaagttaatttaaaaaaagaatgtgtattgttgcattttcttgagtaatgataggactagcaattttacacatcagtaatcttgatagtaaattttaatttccatttaagaatcctcttgggttttaaaattcatctcaaattgtttttttagagtggaataaaattattaaagactaacaatgcctttgcaattatgaattttattatttgacaatacatattagaaaatctcccaaatttaacacagaaaaaggtattccaactaacagttttaaagaaattattacaaataaaatattccatcaataatgtacttatttgattttatagtagctgtttattttaaatattgattttgtttctcagctaaagcttaatgttaaatcttggaaaaaaatttgtttcttacagggctgatcccttatccaacatggttctaaccttcagtactaaagaagatgcagtttcctttgcagaaaaaaatggtatgtttggtctgtttttgacaaagtcaagataatgattttatgttcttaaccttaattaaaaccaattaagtatacagaatttgagttggaatccagtggtttcattgtatctaatccagtggtttcagactttaactacatcagaacacccacctccaaaaaaaaaaaaaaaaaaaacctaaattggaatgctcatacaacatgtaaaagacagactgctctaatttgaagtaccaacagggaatgaaactacttaacgcctaccttgtgtatgaattcctctgtaaaattactaacattttgttgaacttcaattgaacatatatggcagcctattctagttttgacacctctgtttaccgttaagttctttcagccaaacgtaatgccaaaatctagtctattaatctatttaataactcaattatttgaaaatattgtcttattgcctgtaaaatttcccttcagtctaaatgcccacatttgctacttttctagatatagtgggcctaataccaagcctaatctcaactgtataataatattaatgtggcctaagagtatatttgcttttggggcagccacctaacatcattgggttatgttgatcttgctatcaacaaaaatgcaaaatgtcttcctttttccttattttctgctgttaagccaacatagtatagtgaaaggaagttttgcagtcagactaatatggattctaatcttggttatgccactttgaagctatatgattttggattaatttcataatggacttaatgtttctcagttgaaataagggtacctacctcatgaagtgggtgatagctgatacataatagatgttctgcttgatacctcatgaagtgggtgatagctgatacgtaatagatactacttgataactattagttctgaccttcacctccctccagccagtatttctgctgtttgtcttccttagattcaaatgcactactaaacatttgtacctaatgtatcctgttattctagtttctcaaattgaatttgtctctttaagtgcattgttactgtaaggcagtatataaaaataagaaattagtgttctctaacattacctgaaatacaaatgtgaaagcactataaaggttataatctaacatatttgcttttctttttcacctagtattgtatagcttatgattaaaagtctgaagtcaacctatctgcctttgaatctgtatgtcactacctgtatgactttatacttctatttcctcatacgtgcaatgagaattgctgtggtgattaaatgagttaataaaagtgtttagagactagggtctgacaaatactatatgatagtatataagtataccctattctgttattaatagactttttttttatttaagttttagggtacatgtgcacaacatgcaggtttgctacacatgtatacatgtatacatgtgccatgttggtgtgctgcaccgattaactcttcatttaacattaggtatatctcctaatgctgtccctccccccaccccacaacaggtcccggagtgtgatgttccccttcctgtgtccgtgtgttctcattgttcaattccccacctatgagtgagaacatgcggtgtttgctttttttgtccttgcgatagtttgctgagaatgatggtttccagcttcatccatgtccctacaaaggacatgaactcatccttttttatggctgcatagtattccatggtgtatatgtgccacatttgcttaatccagtctatcattgttggacatttggcttgattccaagtctttgctattgtgaatagtgccgcagtaaacatatgtgtgcatgtgtctttacagcagcatgatttataatcctttgggtatatacccagtaatgggattgctgggtcaaatggtatttctagtactagatgcctgaggaattgccacactgacttccacaatggttgaactagtttgcagtcccaccgacagtgtaaaagtgttcctttttctccacatcctctccagcacctgttgtttcctgactttttaatgatcgccgttctaactggtgtgagatagtatctcattgtggttttaatttgcatttctctgatggccagtgatgatgggcattttttcatgtgtcttttggctgcataaatgtcttcttttgagaagtgtctgttcatatccttcgcccacttgttgatgaggttctttgtttttttcttgtaaatttgtttgagttcattgtagattctggatattagccctttgtcagatgaccagattgcaaaaattttctcccattctgtaggttgcctgttcactctgatggtagtttattttgctgtgcagaaactctttagtttgattagatcccatttgtcaattctggcttttgttgccattgcttttggtgttttagacatgaagtccttgcccatgcctatgtcctgaatggtattgcctaggttttcttctagggtttttatggttttaggtctaacatttaagtctttaatctatcttgaattaatttttgtataaggtgtaaggaagggatccagtttcagctttctacatatggctagccagttttcccagcaccatttcttaaatagggaatcctttccccattgcttgtttttgtcaggtttgtcaaagatcagatacttgtagatatgcggcattatttctgagggctctgttctgttccattggtgtatatctctgttttggtaccagtaccatgctattttggttactgtagccttgtagtatagtttgaagtcaggtagcttgatgcctccagctttgttcttttggcttaggattgacttggcaatgcgggctcttttttggttccatatgaagtttaaagtagttttttccaattctttgaagaaagtcattggtagcttgatgggaatggcattgaatctataagttaccttgggcagtatggccattttcacgatattgattcttcctacccatgagcatggaatgttcttccatttgtttgtatccgcttttatttcattgagcagtggtttgtagttctccttgaagaggtccttcacgaagtcccgtgtaagttggattcctaggtattttattctctttgaagcaattgtgaatgggagttcactcatgatttggctgtctgttagtggtgtataagaatgcttgtggtttttgcacatggattttatatcctgagactttgctgaagttgcctatgagcttaaggcgattttgggctgagacgatggggttttctagatatacaaccatgtcatctgcaaacagggacaatttgacttcctcttttcctaattgaataccctttatttccttctcctgcctgattgccctggccagaacttccaacactatgttgaataggagtggtgagagagggcatccctgtcttgtgccagttttcaaagggaatgtttccagttcttgcccattcagtatgatattggctgtgggtttgtcatagatagctcttattattttgagataagtcacatcaatacctaatttattgagagtttttagcatgaagtgttgttgaattttgtcaaaggccttttctgcatctattcagataatcatgtggtttttgtctttggttctgtttatatgctggattacgtttattttgtgtatgttgaaccagccttgcatcccagggatgaagcccacttgatgatggtggataagctttttgatgtgctgctggattcggtttgccagtattttattgaggatttttgcatcgatgttcatcagggatattggtctaaaaatctcttttttttgttgtgtctctgccaggctttggtatcaggatgatgctggcctcataaaatgagttagggaggattccttctttttctattgattggaatagtttcagaaggaatggtaccagctcctccttgtacctctggtagaattcggctgtgaatccatctggtcctggactttttttggttggtaatctattaattattgcctcaatttcagagcctgttattggtctatttagagattcagcttcttcctggtttagccttgggagggtgtatatgtccaggaatttatccatttcttctagattttctaatttatttgcatagaggtgcttatagtatattctctggtggtaactaagatcagttctgccctgatcttagttatttcttgccttctgctagctttttgaatgtgtttcctcttgcttctgtagttcttttaattgtgatgttagggtgtcaattttagatctttcctgctttctcttgtgggcatttagtgctataaatttccctctacacactgctttgaatgtgtcccagagattctggtatgttgtgtctttgttctcgttggtttcaaagaacatctttatttctgccttcatttcattatgtacccagtagtcattcaggagcaggttgttcagtttccatgtagttgagcggttttggtgagtttcttaatcctgagttctagtttgattgcactgtggtcttagagacagtttgttataatttgttataatttctgttcttttacatttgctgaggtgtgctttacttccaactgtgtggtcaattttggaacaggtgtggtgtggtgttgaaaaaaatgtatattctgttgatttggggtggagagttctatagatgtctattaggtttgcttggtgcagagctgagttcaattcctgggtatccttgttaacttcctgtctcattgatctgtctaatgttgacagtggggtgttaaagtctcccattgttattgcgtgggagtcttaagtctctttgtaggtcactcaggacttgctttatgaatctgggtgctcctgtattgggtgcatatatatttaggatagttagctcttctcagtgaattgatccctttaccattatgtaatggccttctttgtctcttttgatctttgctggtttaaagtctgttttatcagagactaggattgcaacccttgcctttttttgttttccatttgcttggtagatcttcctccatccctttattttgagcctatgtgtgtctctgctcatgagatgggtttcctgaatacaggacactgatgggtcctgactctgtatccagtttgccagtctgtatcttttaattggagcatttagcccatttacctttaaggttaatattgttatgtgtgaatttgaccctctcattatgatgtcagctggttattttgctcattagttgatgcagtttcttcttagcctcgatggtctttacaatttatcatgtgtttgcagtggctggtacttgttgttcctttccatgtgtagtgcttccttcaagagctcttttagggcaggcctggtggttgcaaaatctctttgcatttgcttgtctgtaaaggattttatttctccttcacttatgaagcttagtttggctggatatgaaattctgggttgaaaattcttttctttaagaatgttgaatattggcccccactcttctggcttgtagagcttttgccaagagatcagctgttagtctgatgggcttccctttgtgggtaacccgacctttctctcttgctgccgttaacatcttttccttcatttcaactttggtgaatctgacaattatgtgtcttggagttgctcttcttgaggagtatctttgtggcgttctctgtatttcctgcatttgaatattggcctgctttgctagattggggaagttctcctggataatatcctgcagagtgttttccaacttggttccattctccccgtcactttcaggtacaccaatcagacgtagatttggtcttttcatatagtcccgtatttgttggaggctttgttcgtttctttttattcttttttctctaaacttctcttcttgcttcatttcattcatttgatcttgcctcactgataccctttcttccagttgatcaaatcggctactgaggcttgtgtatttgtcacgtagttcttgttccgtggttttcagctccatcaggtcctttaaggacttctctgcattggttattctagttagccatttgtctaattttttttcaaggtttttaacttctttgccatggtttcaaacttcctcctttagctcggagtagtttgatcgtctgaagccttctgtcaactcgtcaaagtcattctccatccagctttgttccattgctggtgcagagctgcattcctttggaggaggagaagtgctctgatttttagagtttccagtatttctgctctgttttttccccatctttgtggttttatctacctttggtctttgatgatggtgacatacagatggggttttggtgtggatgtcctttctgtttgttagttttccttctaacagtcaggaccctcagctgcaggtctgttggagtttgctggaggtccactccagaccctatttgcctgggtatcagcagcggaggctgcagaaccgcggatattggtgaacagcaaatgttgctgcctgattgttcctctggaagctttgtctcagaggagtacctggccgtgtgaggtgtcagtctgaccctactggggggtgcctcccagttaggctactcaggggtcagggacccacttgaggaggcagtctgtccgttctcagatctccagctgcctgctaggagaaccactactcttcaaagctgtcagacagggacatttaagtctgcagaggtttctgttgccttttgtttggctatgccctacccccagaggtggagtctacagaggcaggcaggccttcttgagctgcgctgggctccacccagttcgagcttcctggctgctttgtttacctagtcaagccttggcaatggcggacgcccctcccacagcctcgctgatgccttgcagtttgatctcagactcctgtgctaacaatgagcgaggctttgtgggcataggaccctccgagccaggtgcgggatataatctcctggtgtgccgtttgctaagaccgttggaaaagcacagtattagggtgggagtgacccgattttccaggtgccatctgtcacccctttctttgactaggaaagggaattccctgaccccttgcgcttcctgggtgaggcgatgcctcgccctgcttgggctcacactcggtgtgctccacccactgtcctgcacacactgtctgatgctccccagtgagatgaacccggtacctcagttggaaatgcagaaatcacccgtcttctgcgtcgcttacgctgggagctgtagactggagctgttcctattccaccatcttggctccaccttaactcttaatagacctttaaaaactttttaaaaagaggttcttaagtgcaattccttacttatactttcttggcaagttccaaatttcttaattacataattgttttcaaaagtggtcttttaaaatactattttgacttaaaataacattactctctttgtgaactgtaacatagttatgaaaaacagttccattaatttttttatcttttcagcctattatatttcatgtctgacactttgaaaattattcatttgaagtctgtcacatgagtttaataacaggaaatctaattaaatatttaaatccctggttagtctttctctaagtggtcacaaggactgcatgactacagttgccatgtgaattgccagtgtgagctcaccactgttcctattaaaatcaagtgcctttctatctgacttctacctccccgggaaagaaaactgaggaacactatcaaagtctatagaaagtgtaactttaaaaagccttgtggttagtgacataaagttgtaggctaacagtgaatcaggaattttaacctttaagatagcagaactatgtcctatcttggtcactgctatgtgcctagcacctagcacctagcacaaaacctgacatataatggacactcagtatctggtggaataaatgactttctaaaatatatttctctgactgggcacagtggctcatgcctgtaatcccagtgctttgggaggttgaggtgggtggatcacttgaggtcaggagttggagaccagcctggccaacagcaaaaccctggttctactaaaaatacacaaattagctggatgtggtggtgcgcacctgtagtcctggctactcaagaggctgagacaggagaatcgcttgaactcacaaggtggaggttgcagtgagctgagatcataccactacactccagcctgggtgacagggtgagactcagtctcaaaaaataataaataaataaatagaaagaaacatatttctttactcaagaatttgaaaccattctcctctcctgggaaagtccttaatgattattccactcttgatttcggtatagtacttatgatctgccttatttatttaacatgtagcattctatgtccttaaatagataaatcctgtttcttcagctacagtggaaggaagatctaaataaacaccattgaagcattacagaagtggaggtggggaggccaggcgcggtggctcacgcctgtaatcccagcactttgggaggctgaggtgggcggatcacctgaggtcaggagtttgagatcagcctgaccaacatggagaaccctcgtctctactaaaaatacaaaattagccgggcatggtggcacatgcctgtaatcccagctactcaggaggctgaggcaggagaatcgcttgaacccgggaggcagaggttgcagtgagctgagatcgtgccattgcactccagcctgggcaacaagctccagcctgggcaataagagcaaaaactctgtctccaaaaaaaaaaaaaaaaaggtggaggtgggggatcttttccaaattccacagcatcctcttccttctgacttgcccctcttgggtaggtaaatagtagtgaaggacatgcaaatggatcctccctatccccacaactaaaatcatttgttgtcagctagtgctattgaaggttgagtgaaccgatgttctgataagttaaggcatttaaaaaaaaaaggttcagatgcactaatatgtaaagactactggattaagaggctggtaactaagactctcattccacagtggtctacatcacaggagaacttgaacaagtcatgcttcactacacttagccttttagaagcatatttcttcatctttgaaatgagaagttggattgggtgatgtccaaaaactatagacttaaggatgttaaagcccatgggctagttcgtctttatttctttgctatctagcccagtgccttactcatatgctgtatagggggaaatgagtttttgttaatacagctgattctgtgttaatagtaaaatatgacaaaggttatacgtttatgggcattaatgcttgcctttcagtagtatctagaaataggaagttagggtaaaactgccacatacctacacaaaagatgatttatgtatcacttatcaaattgtattttatattaatgcagcctaaaagtatattagcttttgacagttatttgatttgtatatcaattatcaaatacaatttgttatcaattgtatttgagatacagttgattatttgtatatcaattcagggactattctgaagataaaagcctacctgttatctccttagttttttcatttcccttttaaatgtcaaataaaaagagaagtcatgagcatggtttcccttgacactaaagattgtagaaaatcaatacatcaaggggagtaagattttcagattcagttgctttctggaaaaccttttttttggaggggttcggggctggagacagagtctcactctgtcacccaggctggagtgcaatggcatgatcttggctcactgcaacctccacctcccaggttcaagcgattctcctgcctcagcttcctggactacaggcatgcaccaccatgtccagctaattttttttttttttttttttttaaagtagagacagggttttaccatgttggccaggctggcctcgaactcctgacctcaggtgatccacctgccttggcctcccaaagtgctgcaattacaggtgtaagccactgcacccagccttacaaaacatatttaatgccctctaattatattttgagacttgggtaataagtattgtcaccacagaaagtaacaaacactaaatcatgagccaggcactatgctaagtgcttttcattctcatttagtaactctgtgaagcaggaacagttatctccatttaattgttcaaggcaactgaggtttagagacattatgtcacattaagtaacagggacacatacaaggaggtgaacaagttttatttgaacagtcatgtttattcatttatatatagtctatgactgctttttggctacagtggtagaaaagtagttgtaatagagactatatggccccagagcctaaaaataattactacttggccctttacagaaaattttaggtgacctctagtctaaactgttacgtatactgcctcaatactatgacatttgtgtaagtcccaaaataccctttattcaaacatcttcaagagtctgtgtttaatagacaaattcctcaactgataattcaaagttcttcacaatataggcacaaacttactaccaaagcactaacaagttttgtctgtgttccaactcttactttctgcccttacattccaaacctactacaccttcctccctctacaacctcgttaatactgttctcattcttatccctgcctatgaaactctaacctagtcttcatttcatatgctgtctcatttcttcatcccttttcttattcccctccttcacttgcacctcccatctactactggatgaactcctctttcttccttttaactttcacaataatttgttcctttcttgcagctcttatagtatggttttctcttttaccttttttgtactgcactcagtcagaagcatgttgaacacaccctattgtatgtcagcgctgtatggctaggctctggggataaataaggcatagttcttacactcaaactgtaatattttatcctgcctattggattataagaatttaccagggaagacaagtcctatttatcttttaatgtgctcagtaaatattggtgaatttagcagcaaatttagtaacgttgtaaatgattctccagattatgctttaaacttttctttaaatcaccttaatttggtgacttgttctttttttagaagaactgttgatctgttaattccctgtaattagaaacctgaagaaagaaagctatagtaggatgattaacaatttcttatattttagtgtgtttgtaaaataaaactaatgaatgttttcctgtcaagttaatttggagtttatcctgagtttattaaggattagcatcctgaagtgtattgaaacaaaatgattatttcataatgtttgaattgcttccaaactgcatgttatttattctaaactctccctctgataggataccgagacctagagaagttaagaaaacaagccccagatcaatcacattgctcctgacagcacctaaccttctagattccaagtccaatggttttcctggtactatgatgctagtagatcttaaaaaataataatctagatctacactatccaatatggtagccactggccacatgtgattttagctcttgatatgtgtttaattcgaatttagatgtgccgtaagtgtaaaatgcacactgaatttcaaagacttagtatgaaaaaaaaaagtatctcaatttttattacatgaagtgataacctagaaacactggacgaagtaaaatattataaaaattaattttacatatttccttttatttaatgtggctactagaaacttatgtatggctcacatatttctactgaacagcactgatatatttggcaatatacagggtatacattatatatatatatatattctatgtaaatagttcattaaataattcctatagtaaatatgagaaacaggaaactcatatccaacttggaaaagttcaaatataatacttattaagaaatacagttctattcttcaggtactcttacctagaatgaattaaggatatgtagaaactcttatgttacttataaaataataaagagatactgtaggtctctacagagatactatagtgtccctatagtacctctagagtatagtatagagatactatagtatctctttactatatagatatatggaatagactatagagtatctctagactatatattatttatactctactatctatatagtatctctatatagagagataatatatatactccatatagtatactctagagatgctataagtttctgtagtatctttatagtagagataatagggagggataatagtatagggacgtactatatacctatagtatctctataagtacacaagttcccccattaatcatctgttttcagttgttaaccaaataaggtattatgcaggctcatctttttatataagaatactctactcttgtttttgagatgaaaagaagttctctttctcctgctattgataatttctgcagctgtcccctcagcttatatcttttttgcatagctctctcttctttacctcacttcttatggaaggctggtgttctgaaattggggagtggaaaagaagaaaagactgaatgctccctatgacttcattttctccctgttcccactaccatgtccccaaacatactgacacacaaagaaaatataaatacccctgattcttttagccttaaacttagggcctcatcctaaacatcttaagctcagcatctattccaaaggaactctttaatgataacgtttctttgtaaagagacgaatatcatctggggtttcctctgaaatgtagatgaacctcacttcagttctttgtgtactaaaaagacccacccttctcacccatgtggcttttgtctttccttgtgttatgtaataagtgatggggtagaaggatggggggtggaggaagctacatcatggagagaggaggtagaagacagctgtggaaaatttggatggtggaagactagaatctactaccatttacatgctaatgaaaaccagaaatggtcttttttcccccgtttgatctgatttgaaagtttgtgacttttgtctagtatgtcattttaccccctgtgtttttctcattgttgttagctataaaaactctttgaaattctcaaaataaaggaaggtttctttcaggaataggagggctgaggacaagctgtgaaactgcattcttcatagtgggtctattggggtggaaaacccgcctctgaagtaatagaaggtagaagcacggaaggaaacaggtctggccctggatccaggaaaataaagaaagaaataattggagatgtagcttagtacttagaattatcccagaagtgaacaacatcagtaaggtctgggcttccacctaacgtaacctcttatgagggtctcaacctcacatccatatatcttttaaaaaaacaaaacaaaaaaaaaaactttcaaaacaaaggcaagaatcatgactttcatataggtataaattgcaagtaaaaatttattttactcatataagggaacaaggcaggtgttacaaccagttcagagtaaaagtcaaaacagcactaattcatgtgaaataaaaaaacgtagtgaattgcaaatagaggcaaaattgggttttggtgggggaggtctattaagtagaacacaggacagaaattacatgtgtatcaattgtgtacaacctaaaaagagttgccaagtagctaaaagataaggaactgatctaaaatctgataatctagaaggggaagggtgtgccagagacaatgcacagttttccattgaaacaaaggttttttttttctattccttctccattttgattaggaaataatctcagcaagagattatttgtgatcacaaaataacattggtatgatatttagccttatttacataggtgtagcaagagtgttaatttgtcatatatgctttcttgtatgctttggtgaaagtttttacaaggaatctctgattggactttgaagtctcttgagctaggaaaccacaccaagaacttgccactagatttaaaatctagtaaaaagattcagtaagtctggagtatggcctaaatatcggtatattaataaaactcagataagtgacattgatttccagttgacatttactggcctagaagatgcaagatttaaactacagaagtaaagatgcaaccaagttaatatttttaaaaataacaaattatgactgataaactatactgtaattatttgctgggcaaagcagtacaaggactcaggtaaatagaacacatcttgagcagtgaaggcattgataattccccaggaacttaccatatagcatacaattttggttaataacactttacccatgaaatttaaccttgggatggctaaacatcttttctgcattgacaacttttctcatagttgacaactgttctcaagtagcttgttaataatagcatataaaataaacctaattattttttagcacctctcttttcacaaaatgaaagaatgtatctttgtgattttccagaggccctctagggaatctcagagataattctaggtgcaatgatatcctgaaagttttattttacatttaggattcagttttgggaaggtaaatatcaaaagttgtccggagatgtgaacagttagatatagaatcataggtacctgagaaatgatatgtggccactcattgcaaagtcacagtaaaacttaaatatagaaggtaatatgatggtaaagaaagaaccttagctcttacaatgataagacattctctttctctttctggcacaatcagtcactttacttgaggacataactattctttttcctttaataaacaaaaacacatctcataaccttgcattgcaaagttttacctctctgccaccatttctcctattccagtttcatttatgtgtatcttttaaccaaagtgactgattccatagagaaactgggagatggagaattgaaaatggttacacgtcagcattttagtagactagcagatctcataaatacacataactttctatagctatatgcattccttatactccaacttctccaggtggcaaaaatgaacatgttcattaaccaactcagagatacagcctctctgtagcatatgaaaataagtagcaagagtttataaatttaaaattttgcctagtaattatagtggagaaaagatgtcttttctcacccatcacataggttcgtctcctataataaaagacagttaaaaatagaaaagcacatatttatttaatgtaagttttatgtgatacaggacgctttagaaatgaaaacccaaagaaacaggaatacttgtgtattttatgctaaatttgaagaaaaagtatattgtgtgtggaaatatgactggataaagaaggtatgatccaatagtaataagctagagagaacttagctaggcctgtttgttcagattcttctcttaagtccatccctctgtgatattccttgcctctgggtgatagggcacatgagtgtcttatgacttcttccacgggaaggccagagaattattttatggtctacttcaaggtacaagggtgggaggaggtcagagtggccttccttctctgtttcttcaaatgccaaggtgccattattttagggtagcatgtcctgaaccctatcattatcaatggattagtattctgtcttacttagaagagatctagggttcacaactaattgatcacaaccggttacagatatcattattccttttccactcccacagcttgactccactagccttaaaaaataattaaaaaaataagagatctggatatctaataaatatctattaattacctgacaatcttggaaattaattttgaaggtgacatattacaaaacataattattgttgaaataaaattgtcaataatgaatcaatttggttaattgtaagtttacattttttcttgactaaacattaaacaagtaattttggcttatttgatcagtaaacatgtataattaaaaaaatacgcaagtggaataaaagtctgtttatatatttgacattgataaaccagagaaaaccttgctgttttattaaaccaaaattattagtcttgtttgtcaagatttacctacacgatatgaacttgaagtctcaaaatgtttgttagttgctcttagagtactttttaagtactcttaaaaagtacttgtagcttaaaataatttctagcacactgaaaagattagaagttccattttcttctctgaaaattttaagattactcaatttacataatcacttacttttctctataagctaatcagaacagagttccttttttttttttttttttttttgaggcggagtctcactctgtcacccaggctgaagtgcagtggctgcaatctcagctcactgcaagctctgcctcccgggttcatgccattctccagcctcagcctcccgaggagctgggactacaggcgcccgccaccacgcccagctaattttttgtatttttagtagagacggggtttcaccttgttagccaggatgttctcgatttcctgacctcgtgatccgcccgccttggcctcccaaagtgctgggattacaggcgtgagccaccacgccaggcccagagttccctaaaaagactttataatctaatcagtgccacctgaaggtagaaaagccttatctacacgcacaataaggcttttctctatacagacattgatagacatacagtcacacagagtttataacttcagttctaaactttcagccatgaattaataatacaaaatgatgaaataccaaagagctgttcttttctgaggacaaattattaattgatttgagtccaaaatagattaacaaactagattctccattttttctcacccaatagagaatagacctctataaaccattaatccatttacagggatcatcagatggtcagattgcaaaaccaattccccagattagtagagagcaaaagaccagagtcagagtcagcagagttctcttactgctttggattcaccttttagagccaagaaaagaggtatgcaggcttaagcataaggtacaccatttcttcgatgatgaagtttgcctgcctttggttgataaatctataggatgtctcaaggggacctccaaaatggttaaaagaaattttccagaaaaagatacattgactctagcatagatatacaataaacatgtattgaaggattttactcatctgatataagggagccaggcaaatgttataaccagttcaaaggacaagtcaaacagcacagatttatgtagggtaaagaaatgttgagatgagttgctaattgagacaaaactgatttttccaggactgggttgagaggggagtcaaatctatgagagaggacagactttatgtatctctcaattatagttgttctccttattcacagttatgttctttaaagtcactatgaaacactaaattagcaagaattcttatccctcgggatatacatggttaggttcctgcaggcctctggtcacatagtttgtcgtctgaccagtacataaccttgttttatatgtgtttttgtttaaagacaccttatttaatacagttaattcatcaacattgaactcacagccaacagcactataactcatgcctaaacaaagcgtatctgaaacacatattggcacatcacagctttcttggaacactagataacatttcagcagtgtttggggaccattttaaacagtgaaattaccaaaaagcagcacagaaatgcaaaatactggcactaaatagagcacaaaaagtatgcttgtttacagtatgagagctaaaacaagaaggcagagcattatcctgcttcacctcatttagaaatgtatgttacgggactcaaattttttgacattctccacatgtcacaaatgaccacagaagcaccatgggcattgatttaggagtcacaaataaactttacgtgaattcatgaaagattttttttttcatagatagctttttcctcccaatgtttaatcctggatcctgtctgtagctagggaagtactgctaaggcgcgagcacgagagagaattatatatggtggcttactgacgttcctggtatattataggttaaataggattctgagactccctatgagtagcttgcaaatctctggaagtggtttttggctatttgtgtagtttttttctccagaaaaatgtgttctaaatttctaatggctgattttcagatatacttttggaacacaaaagctggagtaatggattactaccttggtttgttttgtggcaaatgctgaatagttccaactactgctttgaaaataatagaaatattacatagcaagtatattatttgaaaagataaaatttcaaggggccgttgactgtcacatcaaagcagtaatttggggtttgagaggtggcaatactctacagcaggtgtagagtattactaatctaacaaatatttcaggtgcctcatgttttcaccttatttgcttgtttaaatcactttatataaatttcatggaaagacttgctttgccagtgtatccgaaacctctgttatttctccatagtattttctatagaagatctaggatacttttacattattctgaaccatttaccccctactgtaccccacccccatattatgtacctaattggtaatttcaaagtaaagagacttttaaagtgaaattcctaaaaagctatttttcttttctccttcttaaaattatatgttagggttatgctccgctttcagccagatataatatgggtacatagcctggtgaagaatcttgaaaccttccaagtaccagtataccttgctttggcctcccaaagctttgctcttctgatcccatgcttcagttggaagtgactgtcagttacgtcagtttgtgccaaattatgtggtagttcttgttctgtgtacaaatggagagtaggaaaaatcatttagctgttcacttccaaactcatgtcagggtttgagattaggttattagagaagacagacctttcacagaacgtcaatcaaggttacttgagataaaatatttcacaagcaataaaagaactgatggatgtttgtatttttgtattactgaaccataaatgaaatgattctgtataaaaatgaatgaagttgattttatttttctgtcttatatatggaattcataagttaattgtggcctggttttgttcagaggttggggttttttggcatttgaaaagtatatcatttatatcataggaaatagaatattccactcacaatgtggagatctacaaaataaactgtcatatttcagaaaaagaaattgggcatgggatgttaaagatcacattttaagtttactacagcattttccaaaggtacttctctgatactagggcttaaagttcagactattttgtgaaagcgtttcagtgtgtgaaacagcaaagggagtcagcttctcatcatttaggtgctggtagttgggtttgtggcaaatctgtgccatatggctactctcctctagaaagtgacggcagcactgggagctttacctatccctagggcagctgtcttggactccattgctttgatcttcttctgtcgcacagctgagaagagcaaggggctggttttcagtaccctaataggacaacatatgggaccattatgattgtagactataccttcattttatataagcattcttcagagagtgcaagtattttcacttccatattcccattcagaaaaataagtttgggctctttcttttaaaaaaaattattttagggttaaagaaagacattcttatagaaatttaaacatttaatatctacattttatttcttgcaaaatacatcctttttagcaacaagtttcaaataggaagtagaaaagatgagtataattcgtctaacttacccattcttaagcatacatgcttaatgtcctttcaagtgttgttattcttagagttttatctttttagctcagcttccctgtttgctcaagtaacctttacattcgagtatagtgggaccagtaaatttgttcatccaggtactgtaacaaacaccttggaggaggatgcttggaaatgtgatcagattcttaacagtacctcaaaaaacagcaaatttttattatgatgacagccctacatagcagaaaagttttctgaataatgaatagaaaatccaaagagagatgtatgtggattcttactttagttttagtctctattgtgaattgtcattggacttcctcatatgctcctttgcgtttagagaagcacagttgcatgtgcaactttggaaacaaagttgtttgccacagaaaaacgggaagataataaattttttttccctacacatcctaacaatcatgagtggtcagtggtaattatatagagatggatcctattagaaaatgcatgcttcttctctgtgtatttttgtttgtttttcacagggtgctttgcccatccacattccaatctctgtcatgatacttctatttatgttgttatcaccatcaacagcaactgtaatctggctcacaattcccaggagccagctcactccttagttaccaggggaaaacccaaaccagttgttcttttcttttatatgtataaaacttcattcttctcacattgcagtgaccctgaccacattttggaactccataaccagaatagatattagaactgtgtctgagatctgatgtagtacagagaattctacctggcggctgaaagggtaattgagtgaatgagagagtgattatcaggtttgtgtttgtgtgtatattactatttcctagatatttgagtgctttctcatttcttctgcagtttctttcctaatgtctttattgacctggagagtgtgtgttgggaggtaataagaggagagagaacttaggtttcttacctatcatttggcaagaaaagaatatggaggtcttgggttaattttccagctatcattataaccacatacagaatctacactagaaaccatttccttcctcacaattgtgggagagcacatggggaacatatatttattttacaggattcttaaaagtcttttcaacatattttttcaaataaaaggaaatgaatgaaatagataaaacttgcaattgcgggatatttttaaagaaatgcagttttattaataaagtacttaggtgttaacgtccatcttggttaaaatcctggttttgcaacttattagccctgtgaccttaggctgtttattttctcgatattttttcctttaaggtaatgtaaaattaagatatatattataatgccttccttatagccatgcaacctataaactctgtacataaaatttcaataaaaatacatttcagtgtggcgattcctcagggatctagaactagaaataccatttgacccagccatcccattactgggtatatacccaaaggactataaatcatgctgctataaagacacatgcacacgtatgtttactgcggcactattcacaatagcaaagacttggaaccaatccagatgtccaacaatgatagactggattaagaaaaagtggcacatatacaccatggaatactatgtagccataaaaaatgatgttgagttcatgtgctttgtagggacatggatgaaattggaaatcatcattctcagtaaactatcgcaaggacaaaaaaccaaacaccacatgttctcactcataggtgggaattgaacaatgagaacacatggacacaggaaggggaacatcacattctggggactgttgtggggtggggggagcggggagggatagctttaggagatatacctaatactaaatgatgagttaatgggcgcagcacaccagcatggcacatgtatacatatgtaactaacctgcacattgtgcacatgtaccctaaaacttagtataataataataaaaaaatacatttcaagcactcagcatggggactagaacatactacctagtacaccaggaatgctcttgtctcagggcctttgcagttactgttctctgcctacttctcagggagggaggtctcccctgtataccccatctaaagtgttttctcctaggttagattatagctagctatacccgaaacaacacaaattcaaatttaatgggctctaatgtaatggaaatttatatagagacatgttgctatgaagttgtgaatcaaatttgaggaccaaataatacttaacatttattgagtgcctactataaaccacaagagacaatgtagcataataggtaagttgtagcctccagaatctggccgtctgtgtttaaatcctgattctgccccttctttgctgagtgaccttatgctagttacctaacctctctgagcctcagtttactcacctgtacaaggggaataatattacttcatataaaggttttaggaaaagttctttctcatagaactcaataaatgattgttaagtcagggtgctttctaagcactttacatgaattatcacatccttatgaagtacaagacatgtactttaatcctcatgacaaccttatgaaagacaaagttttcttatgccctttagtaaattttttgaaatggagataactacttgttaatgtacgtactttgtaagtccacattctcttaaagtaagctatagctttgtaactttaatggataagaaagttctcaaaacatattttctactctgtgaaagtaaggttatgttgaacaagtaaattaatattttctctcctggattctgatgtttcatttgctttcctgcttccccatttccttatagttattggactttctttggagatggagttccagcagttgggaatgtaatattctcttatggataaagtagattaaaagtttaaattaaaatacgctgttaaatgttgttactttcctttgtgtacagtagtagtagtatactttgatgagttgagttccataggcttaacttttgtggtaaaactgaatactaactaagggactattgaaatgtaagctttgtggcagaaagtactatacttaccgagatcaagaggctcacttaattagactatataataaataatcacatttgggacattttgtacatgactgcatgatacagccatgaattagatgtttcaagatgttatttgaataaagtcctgagagaagaataaattacaggtgtgggaaaatggattttatgaagaaaagtgaatgttataggggttgcctagcttagggaataaaagaatgacttaattatatttttaaggaggaggatgttgatttgtttcccatgttttaggagaactaaagaacaggactagtgcagaaaatgtagacatacatatacccagttttcagaattacaaaatgctgaaatggctttggaaggaaaatataaatactcagaagagaatagacagacacctttgattagcggcccttacttttttatgcataaaaatctcctggaattgataaagtgtagtttcctgggcccccaccagagattctgatctagtgggcctttggtcaggcctaacaatttgcgctctttatcaggtactcccatctgagtccaattagtgcagatagatagccattgaaataaatgttgaaaatcaatttttgagtttaatcagtagcctgtccaagtccaggggattgaaccaagtaacctctcatggtccacttcaactatagtacacacatgcacccatacacacgtacatatatatacgtttacatatttttctgtatccctttggaagagttccaaactcttgtaaagaaaccaacttttagaataatagtgagttggttataatgttcatcgctcttcattgcaactattttaaaggcctatgttaaaccacatagagtaatggaaatttttatgtaatacatagatatcagtaattgagcaaggtgaaattgaatcatagtttacatctttaacaacttgagatatggtaaataatctgcaggcaatcttttggacccttttctcacagaggattgattataagggaacaaatagtaagtatatctcagatgtgttgacatatactcttgatgataaatgaacattaagttaagttataaaagctagcctctgcttgctgtgcttttcaggtatcctctttaattctgtttctgtggatttgtctttgttttttcctcctaggatggagctatgacattgaagagaggaaggttccaaaacccaagtccaagtcttatggtgcaaacttttcttggaacaaaagaacaagagtatccacaaaataggttggcactgactatatctctgcttgactgtgaataaagtcagctgtgcagtatttatagtccatgtataataaatacatctcttaatctcctaataaattggacctttaaactaca

SEQ ID NO: 19 - DNA, 7193 bp, Homo sapiens
agctgaccctgcgggaccggaaaaagaaattcccgggccctggcttcttggcgcgatggtgaggcactaggggcgaagcgaggcttgggctgctggagcgggaatgagggggcgccaagtggctccggaaactgggggaggttgtactggcctctccgcaaacacagtgtgtgcgggcgtgagggctgtgagtctggtagggaaaagtccaccactctcccgctcccgagacgggggcgggggtacggggcgggtaagacagagcaggccggccggcttagagtcccggtgcttccctggcggaaggaagggcccctgcctcccggggcaggaactagggcttgtctggagctgggagtcctttcaggtcttccccatccccaagaggacctcccaaggatacccccttccccagccctgccgtggggcttgtacaagaaggtgcttagaatcaggctcactcttccacactgttaggaagcccctccgctctttccagagccagaaagtagtagttttggggttgagacttatccatccatccatccaatccatccatccgtacgttctaagcgcctggtctataccatgaagtgtgctaggcactgggaggacttgagctgccaagggaaggggaaatcggaggcttgaattggagtcatagctaaggctccaggggcagagacctaactgcgccttgtgtgtagtgctaagggggcttcctaaggatgccatcaaacttaaaggcggatggatggcaggagctggctggctgaagtacagtttgtgtaccaggggtagggaggcaagggtgggagacgtgtgtcttcagacagggaacagcatgtgcagagacttcaggttagagagagtatggctccccaggaatggatgcatttcccatagctgggagagtatcatctgcaggttagggaaagatgaggctggacaagtagagaacaaatcttcctggctcttggatcaccacaatcaagataatgaacgtatccactggcctccataatttccttgtgtgaggggctattttaagaagtataatcaagaaaggctgttctggctgggtgcggtggctcatgcctgtaatcctagcactttgggagagtgaagagggtggatcacctgaggtcaggagttcgagaccagcatggccatggcactccagcctgggcaacagagggagactctgtcttatttttttattttttaaaaaaagaagggctggtctgatgtgtcacttaaaggatagcaagccactggccaggcgccgtggctcacgcctgtaatcccagcactttgggaggctgagggggacggatcacttgaggtcaggagttcaagaccagcctggctaacatagtgaaactctgtctctactaaaaatacaaaattagccgagtgtggtggcacatgcctgtaatcccagctacttgggaggctgaggcaggagaatcacttgaacctgggaagcggaggttgcagtgagccgaggtcgcgccattgcactccagcctggggaacaagagtgaaactgtctcaaaaaaaaaaaaaaaaggatagcaagccacacagagagtgcagcaggcatggaggcgggagcaaggctggtgtgccccagcagcagcagggaagctggagtggctggagttgtgtgggtatggggaagaggggagagagttcactcgtctctgtgaggcccaggactttgttttatcccatgctgtacccccagcacttagagtgggagctagcacagagaaggtgcttaattgatgtttgctgagcagatgaatgcctggagtagacctcagagcagggtttggtggcagggtgggtcagggagagagtttactcaacagcctggtgataggggagaacaagaggccagagggtatccatctatgtcggggaccaggggtccctggtgggcagcagtgtgggagacacacggatcctggccacacctcaggcctccctccagcctgattacctgcctccctcccttgcagaggttccggttctgtggtgatctggactgtcccgactgggtcctggcagaaatcagcacgctggccaagatggttgagtgcacagggtctagtctgggtggaggaggggtgttgggggtggggattgtgggtgtagaggatggtgaggtttctctggggctagggcctcagtgctctcagcctgtgctaccatgctttgtgaccttgatcagtggctggcctgctctgagccagtccccaggaaggaggggtgaggtttgccagcctggctgatgtaaggacttcccttccagtcctctgtgaagttgcggctgctctgcagccaggtactaaaggagctgctgggacaggggattgatgtgagtacaagatccagcaccccattgtcccatgaccttatgaccaccactgccctgaaactctgcactaggcccagggagacgggtgagccagcctctcaacctctctgggcacctcccttccttctttccagcctgtctgttccttatcgcaggatccaggctgggggtgaggggctggtgagcaggggcctggcaccccctgaaggtctcctttccccatagtatgagaagatcctgaagctcacggctgacgccaagtttggtgagtatcccgctgagtctataggccccaggcaaccctgggaacttggcctggtgcctggtacagaggggccccccacccctcccagcagcatccttaacttaccttccctagtggaggagcatgagggaaagaaagaccgacagtcccaccttcctgtcctctgccagctcctggtggagcagtagcagtgcctgtggctccaggaggcctgggggctttgagctaaagttaatagggcaacagggaggtggctggacccacagtgacaccccctgccccacccacgggtccctcagagtcaggcgatgtgaaggccacagtggcagtgctgagtttcatcctctccagtgcggccaagcacagtgtcgatggcgaatccttgtccagtgaactgcagcagctggggctgcccaaaggtacgggttgtgggtgggcagctgggcagcctgtgggccaagggctgctagagaaggggacaggccctgtgaccctgaggtgtacctgccctgtctgggccaggagcccaagccaggccccgacatgctacctccagagctactccattctacccccagagcacgcggccagcctgtgccgctgttatgaggagaagcaaagccccttgcagaagcacttgcgggtctgcagcctacgcagtaagtatgaggccagccagggtccgggctcattctagaaggtgcacgcagcacacaaagtgcatggagagtccagggagacgacttaaccacggtcacatggttactagcagccgtagagctgggacctggccctgggtctcctgactccccacaaggtttcttgtcactgaggtctgctgtgggtgatcagaactgattatcgggcacctgccctgttctgagcctgggtcagcaggatgggagcttcttagaggccacatagccttgaatggttgagagctgagccagggtgtcggctgaggtctacttggcttgcctgctttgatcctgagagccacccaccccatctcacagtgaataggttggcaggtgtgggctggcgggtggactacaccctgagctccagcctgctgcaatccgtggaagagcccatggtgcacctgcggctggaggtggcagctgccccagggaccccagcccagcctgttgccatgtccctctcagcagacaagttccaggtcctcctggcaggtgaggctcagctattcctcgacgggtgagaggctctcccagatccgcctgactgcctcccacctgcccacctcttccctctgcagaactgaagcaggcccagaccctgatgagctccctgggctgaggagaagggtgttccaggcctgtgtggagccgccctgcccgtatggagtcacgccctctgaactgctcttcgggaggcagccctggttctaggatgctgaggccctggcccggactctggcctcccagatccccagctgcctcacttctctcttgagaacttggctcagggctcctgaggacctttcccagcattaccttcccttcccttgaaaggcaattgttggctgttttcataagcaggaaaaataaacagaagtataaaggaatgtgtgcagggggttctgtttgggttcagatcaagggtttttgtgagagaaacacaagtgacatacaggccttcttggtccatcactcattttcttttctcaattgctgattgagggaggtcataggtaaggccaactgaggaccaaaatgcatctgcttgtctggtgagaagaaaatcagggttctagctcccagatctgggatgctcttggctctgctgtctttgccccctggccatgtcctcaggctagcagcacgttggtggccccaaagccaaatgccccttgtacagaaaggagattgcccttgtttcactgccatcttctatttatttatttatttatttagagacggagtttcgctcctcttgcccaggtttcactgccatcttgttatttatttattttgagatggtacagtggcgtgatcttggctcaccacaacctctgcctcctgggttcaagcaattcttctgcctcagctgcccgagtaggtgggattacaggcatgccccactactcccggctaattttgtttttttttttttttttcagtagagatgaggtttctccatgttggtcaggctggtctcgaactcctgacctcaggtgatccacccaccttgccctcccaaagtgctgggattacaggcgtaagccactgcgcccagccactgccatcatctttaggaagagagaagtgaccatgcctgaaccagtcattggcaagaggaacggtgttatggactgaatgttcatgttcctccagaattcatatgctgaagcctctgtccacacatgcacaccagatgagggccatgtgcgcacacgaggtggctgtctacaaggccagaaagagggctgtcaacaggaactgcgtctgctggcaccttgatcttgaacttcccagcctccagaactgtgagaaagaaatctctatggtgtaagccactagtctgtggcattgttatagcagctcgagaagactaaggcagatgggcttccaggactggcccagaccagccagggctccttgtagaaaaggctgatgccagggttggcacatggagggtacaaggaggactcgcctggagtatcttaaggaacctatcgaagaataatggcttgttccactggccaaagatgggacaatttgaacatcaaaagagatacttactgactccactcctgacttctgcttctgaaaaaatgaagtaggtgttttccctattcctcccactaagtacagttaacaaccctggatgttacatataaaacaaacaaaaagactccgagcgatggagagaaggcaccctagcctggctgggatcctcaggacctgaggctccacagagagaaattcctggaatctggaccccatggcccagtcaggttacacaaaactgatcatcacagatctgtagaactatacaaaagtgctaacattcatgattagggtctcagaaggtaaggaggaagagagtggaatggaaaaagtattcaaaaaaataatcactaaaggccaggtgcagtggcccatgcctgtaatcccagcactttgggaggtgggacaattgctttagaccttgcaactggcctgagcaacacagggagactcagtttctccaaaaaaataaaaaattagccgatcatggtggtgcgtgcttatagtctcagctactcagaaggctgaggcaggaggatcaatcgcttgagcccaggggtttgaggctgcagtgagctgtgatcatacctctgcactccagcctggataacagagctgagaccctgtctcaaaaaaaaaaaaaaaaaaaaaaaaaaaatgtatatatacacacattggaatatttttcagcccttaaaaagcagaaggttctgtcatttgtgacttggatgaacctagacgacatgatgctaagtgaaataagccaggcacagagagacaaatacctcgtcacctcacttatgcctggagttgaaaaaagggcctggggcagtggctcacgcctgtaatcccagcactttgggaagccaaggtgggaggatcacttaagcccaggagttcgagaccaggctgggcaacatggcaaacctgtctctacaaaaagtaaaaaaattagccgggtgcagtggcacatgcctgtggttccagcacttgggaggttgaggtgggaggattgcttgagccagggcggtcaaggctgcagtgaaccatgatagtgcccctgcactccagcctgggtgacagtgagaccctgtctcaaaaaaaaaaagttaaattcatagaagtcgacagtagaatggtggttagcagaggctggaggagagagagggtgggttgtggggaaaaggggagacaccggtcaaaaggtacaaagttccagttaggaggagtacattctggtgatttattgcccagcgtggtgaccagttaataatgatgtatacttcaaaatagctaaaagagggttttaaatgttctcatcacaaagaaataaatatttgaggtaatggatatcctaattagcctgatttgatctttttttgtgttttttgttttcttgagacagagtctcactctgttgcctaggctggagtgcagtggcgtgatcttggctcactgcaacctccgcctcccgagttcaagtgattctcctgcctcagcctctgtagtagctgggactacaggcatgcaccaccacccctggctaattttttgtattttttgtagagactgggtttcactatgttggccaggctggttttaaacttctgacctcaggtgatccgtctgcctcggcctcccacagtgctgggattacaggcatgagccaccgtgcccagccgatttgatcattccacaatatatgcatgtaacaaaacatcacactgtactccataaatttatacaattattatttgtcaattaaaaataaaactatagataagtcaaa

SEQ ID NO: 20 - DNA, 143496 bp, Homo sapiens
aaacgaagcccacccaccgactgacaaggccccaaggggacaagcgatccccgcgcgggatactcacccgttacctcaggatcgcgactacaactcccaggaggctgcgcgagcgacggaccaacgcccttcccagaatgcagcacagctgcatccctaccccgccctctcctttctccgctcctcctgcttttctacccgtcgtcacccgggagagccggaggtagggttcgggaggaggatcccgaaggctcggcgtgtcgcgtcagacgccgggagggggacggggcggggagtagtgggggagaatgggaggacgaaggggaggggaaaggacaggggaggggagggtaaatagtgggccaggcaggaagatggcggcggtagcggaggtgtgagtggacgcgggactcagcggccggattttctcttcccttcttttcccttttccttccctatttgaaattggcatcgagggggctaagttcgggtggcagcgccgggcgcaacgcaggggtcacggcgacggcggcggcggctgacggctggaagggtaggcttccttcaccgctcgtcctccttcctcgctccgctcggtgtcaggcgcggcggcggcgcggcgggcggacttcgtccctcctcctgctcccccccacaccggagcgggcactcttcgcttcgccatcccccgacccttcaccccgaggactgggcgcctcctccggcgcagctgagggagcgggggccggtctcctgctcggttgtcgagcctccatgtcggataatcagagctggaactcgtcgggctcggaggaggatccagagacggagtctgggccgcctgtggagcgctgcggggtcctcagtaaggtgagcaacccctggtgccaagggacccctggccagactcacctgcagcgaggcaatccgctgaggcggtggggtggggctggcgggaggcgcggaacgtgccggggtgcgaggctgagtgttgctgcagcgactagggatgaggcggggatataggggcactgtccttgttgcccgggggctcgtcgggggcagccgaggaccagggaaagggtgtataaacctgagatccagtttgggaggccagatgcgcgccgtgacttgggacttagggcggcagctgtcccgggtgtaaggaatccgggttgggcttcagcggtgtccgaacgactgggcatgggagcggttcaagtcggacctcttaaaagaggttggtctctctgaggatgccaagccgagtaggttggggggcactgcggacgcaactctttcgacagaagctggagcgactcagcttggtgttgaaatttgaggtgttgaattctgctaggttagatgtagtgagacagatgaatgtggaggactttctccctcaccctgtaccttagttcagaatagagatattgaatcggcacatgatgggtacaggaaatattcatagtaacttggaacatgtgagaatggagactgatctttagtccaggaagagcattacttaataataaaatatttttgcggtaaggggtcgagggtaaggaaaagatgttttatcttttatatattttttaaaatccctgtatcaaaattttagcaaagcagtcattataggactgcaggtggatgatctcttgatattacatagttgtggggattttttttttaagtttttgctgtaagaagattcacgtagcctttttgacttctctctcccttcctgttaaacttttttagacatggctggagctagcagttaacttggagagggggagctgggccagtccctcaacaagctggtcataagatactatgtcatgtgcagccagtggctattaagaaatcaccctgtttccagtattcatatttggcaaatcacttggacattatttgtggaattgtttcatattaggcttttataatgtctagaaagctaatgagaagggggccaggaaaggcatgagtagtcagaactaaggattgcaagtgttgacttttatttgtatagcagcaaaattatgttgtatattgatgctgtgatcattcttgaaatttcagtgcaaggttttcagtaacgagaagctcctcaggatttctttagattaaatgtatcctgtaatttaggaatctctattgaacacattgtgtagtaggtatacattttcagttggtaataggaagtgggttacttgcttctcagtgattttggtagtttcatcactgctcataagatgggaagctgactgccatattagtattgtgatgtgttaagtattttacgaaacaaattgtacttttgacctactgataattacttttttgggggttgggggagtggagtgaccgggggaaaaagtaaccagtgctctggagtaggtatactatagataaaaaaatggaagaccaatctcgatatttaaatgcatacaaatgtatttgatcacctctatggaaggtgaatagcttaaattttgactgttgctgcatatgtagaatgaataggaataaagcttttggtattcttgctcaaagctatgaaggaaattttcctgagatttaccaatttatggttatatacagttttctggaagctttttaatcaagggtattctaaattgagtatatatactcatactgagtatggtagatgtttttaaatgtaaattatatagtttgaattctttgtattcacctggtaatttaaacaaaggtcagaactcggattttgttcttttccttccattgagtaatgtaaataagtcccggtacaattcattttgtttctcccccaaaatggggtggatttggaatgggcttgggtaaatttatattagaaatataccagttcaaagggtattttccatatggtaatctgaaatacatggaaatacctatgaagcatatttcttataaatcacttaagtgtatagattccaaaaatactagatagacaataattctatctagttatagcaagtatcgtgatggatcatggtggggaaaagatgcatgccttagtaggacttgagagcacctaagcctggataaaataatctcattcaatttctgaatttcctccatccttcatggtttaccttctgtttttccacacaccaaactgtttgaaattctgtccatccttaagagtccaagccaaatactgtcctttccataaagccttttcttattttgccatcattcaagacctccttcacttgaattcccatagcattttgtttgtagcttgcttctgactcttattctaaatatatatttttttctcttgagtttgtgtctgctggcctgttggccacagtaatatttgattcccctgcagtgtctagcatattgccttatctgtatttgttaaatggggaagagtgagggaacattatgagagcagagaaaagacaaaaaacttgtcttccaggtgtcatgatacagctaatacttactgagtaaagggtcctgaagctgatacagtttgttcagtctcttataagaactaatattaagttatggatacataattgctggggcttctcctctaacattgaaagagttctattctagtgagaaatgctgaaggttaagcttcattagctatgtataactcttcctcagattcagaaaatactatgtccaggcactgttctaagtctattcttgtttaaacttaactctaagagaatttgacaaagaaaaaaagaacacaaagagaataagtaacttgaccactgtcacaaagtttagccttatgaagtgtggtaattgtaaatgaggtaggattaatccatgaagggtcttgaatgccctaaacaatttgtatgacagtcagtgggaagttgtccatgtaagttttggagctagagactcaatacgatcaatgtaagaaaagtaggcaaatatgcttagtaagtaaataagcttgtgtaaattatgaaaaaaacagaagatactagagaaaaaattattaagtctcctaaggaatacaggaactggataatttgattggaatagttgaaaatgagaagaggaggcaaatttaagggtttactatgaaggaaagatgagcagcttttggtaatgggctataaatattgagaaggaacacttaggtattgagtatcttctgtgactatgctaggcattttcattattttattcggccgtcagtcaacaggcaaagaaactgaagtttacaaaagtaacttgtcaaaactctcttcacatgagttataaaatagttgagcctattttatcctatatccactaatctgtttgtatatctaatacactaactctgagcagaagtagcagtctccccaaggaagtaggaaaataggaaggaagtatactttataggaaggtgaattcagttttattggtaactatcatttatttcaagcccgtgtctaagtggtggtacatctcaagcagttagaaataaggaaatggtgattgggagccactagaatgagttaaatgttggcttgggtgagttctcagagagtggttgtaatgatggggcttagaaaaattaagaactggctagggatggtggctcacctgtagtcccagcactttgggagaccaaggaagacagatcgcttgagcccaggagtttgagacgagccttggcaccatagcgaaacctcatttctacaaaaaattagccagatgtgggggtgcacacctgtagtctcaatcacttgggaggctgaggtgggaggattgagcccaggagattgcggtaaactgagatggtgccactgcactccatcctgggtgacagagcgagaccctgtctcaagaaaatactaaataaaagaaaatttaagaagtgaatcaatctcaaaaatgcttaattagagaacagaaaaataaaagatttctcagtggatatagagcctgagccaatgcagtatattttggcaatccatttttaattagtttttggaattggcagatagtttttgagatttttctatacttaacaccccagagcatagataaaaacatgcaaaaataagtattcctgtaaaggttacatttctgccttttccagtttattgtgatcttcactttgcagcaagactttagcaacacagaaactcttaaggtattgaagacaatccaatatgtttttgaaaagcaattttatttttgttttattactcttgagtttgaaaaatgcatgttcagaggaacttggaaaatgtattggccatttttaatattattcagttctgtagaggaaaagttaaagttgatgccagcttactaaagattattatttttattttgatatagttacagctgttataaattttcatataggaataacaacaaaagtagagtttagcaataattgactttatacttccgttgatttagaaggcttcatgcagtctttggtgtcagaatgagagactacatacataactgaacatacttctctgttgaatatgttaattatgacaaggaccaaaacaaatatcatgaaggtacttaggagaggatgaaagcatacgaagaataaacaataattttaaccaaaatctggctttcgttttattcttcaaatgttagaagaaaatgttatattttatttcttacagatttatttataatattgtaaaaattactgaaaatcattatgcaatctagaaaatctcaacttttcactttttgtaatcattttactgtttatgcttagaattaagttggacttttcacgttttggttttaaaattagattgctgtttcacaaagtttggatttctaaaatacttctattttttgttttcttctctcttcccttccccttcccactcccagtggacaaactacattcatgggtggcaggatcgttgggtagttttgaaaaataatgctctgagttactacaaatctgaagatgaaacagagtatggctgcagaggatccatctgtcttagcaaggctgtcatcacagtaagttccttttcttcttcattcaacaaatatttattgagtgtcagctacataccaggaactgttctacgtgttcaggatacatccgtggataagataaagatccttgtccttgtagaatatacattctaatacttttttccataaagtgattttactgtggtttttactacatattgttattttgcatagacatgtagtttttatctggtgggtatatcaaaccagtttaagggcttcaggaaaaaaaaatgtttgaagcctttttatttgttgaggctgggacagttactttgtaggttactgaatatttaaaaataatacatcttgtaagtaacattctaaaattttaacttaaaaatataaatgtaaattcatttttaaactttttaacattgagctaatgccatctctttgtggagttgggagaagctgttctcatgttcctcacacatgatttgctatttacagttttgatttctctaatgtggaataaaagcctgaagataacttttgaaaaactctaagtataggctccttctaactttttatgatttccccttatattttgcagttacatcacttttctccaattcaacaccctttaaaagaataactcaccttcgttgagtcattctacttagtttacattttgttgttctttttttgtttttttgttttgttttgttttgtttttgagacagtcttgctctgtcacccaggctggagtgcagttctgtggtctcagctcactgcaacctcgacctcccaggttcaagcaattcttctgcttcagcctcccaagtagctgggactatagccacgtgccatcacgcccggctaatttttgtatttttagtagaaatggggtttcactgtgttggccaggctggtctcaaactcctgacctcaagtgatccacccacctcagcctcccaaagtgctgggattacaggcatgagccaccgcgcctggcctacttagtttacatttaacttagtatatagaaacaactgttcctttttgcactcgtagtcattagacatgaataatgtttaagatatgtaagaactataacaagtaaactggcataaacaggtttgggaacaaccaactgacttgttaagcatgtaacccaactagtgagaacagaagtacctgataatacaaaaaatagcatactggttaagaatggtcagcatgccatgggccaaaaaaaaaaaaaaaaaagtgttggctaaggccagacagttaaatagaggtcagttaagggagctgttgtagttaaaatctgaaaatgggtacgttaaaacaaaaatacagagtttactaactcactcaaagagaagtcacattttgtgatagaatttatttggcttataaaagtgaaagatatatatataatacttcagatttccgttaatatctaatccttacttagcgtatgtttgttatgcatttagggaaaatcttacagtatttttacattattttttatacattatttccccccttgtatattcaaagtttgaaaacaaaagtttagaattgaatatcaagttagagaaacacagaagaaatatttggaagtgttgataatgaaactacgctctctattcttagagacaatttttaggaaatagctttaacataaaggctcagtatttattttgactggtatgtggtacattgtaatgtgtttagaaattgtatctagtttaatattttgggtgtttttcttccgagatagatcattattcatatcaatggacagaatagtggattgaaatgtaccttgcgatcttgaagtgtttttccttgatcctccactccccttcttttgcgtattattattggatgtttattagttgcaatgcttaactctttgaaaatagtataatgattgatgtaaaaatggggaggaattaaattttatctttattattctctaagtagtagtattcctagagtaccatgctagtttctgtggatttaaatatagttattctgtcttgaattatggactataataatgttgcctggcttatttggagaaaagaaaattttaaattaaacatttaatttaaatgtttaatttaaattaaacaaaaaatttaaatgtttaatttaaattaaacaaaaaatttaaattttaacatttatatccatcttctcaggaagaaaacagtgttactttattgtaattgatttttgttatagctatatgtacatgcataactttcattgtggtacatagtaaaagacatgcgtaggaacaagaaacaatttgaattctttgaaggagagataaaagtagaagtaaaaagatgaattaggcaacaaaatctgtgtggtagtcttagatacaatgaaatggatgataggaaaaaacacaagcatttatattattgaacttgaactttccttgccctttgggttcacagactccatgttacatatttaaaggaaattaaaaatataactgaattcagtgaactcaggatgagtttacaaattagagtatgtactttagttaaataaataaatgtaatagtaatattcctcattaaattttaataggcatctcttggtattttttttccttaaatatgggctatgcctattgtcacttcatgtcagaatacaaagaatgtaaatgtttaatttctttatatggcactcttatgaaattgataatattcacgtacaaagaaatctgggcttgaagagttgatgtgactttactgtaaccattcattactatattatttgttggtggacctagcatctgaacccacatttcttgatagagcctaatccattttaagttcattcttagtttaatgattaaatcactcttaatttataaaaacaatattctttatctgtgtgataataaagtgggtgaaataatttcaaggaagaaagtatgtcttgagagaatttattccttaatgtgaaaggattgacagtaagtaggtgagaggaaaaatagtattcccttactttgtgtaaaaagagctatttgtatgtagaataagtgtttgtagaaagacagttgaattcttcagttattatagcttgatacttagaagacccagcccctgctacaaaatttgccgcatagtagatattctgaatatgttagttgtaattgtttcaattaaaagcaaatgtttatggaatatttacactgtttactttttatattctatttttaaaataaagtgcacatgataaaaaatataatttgtggcattaaaaagtttaagaagtacatgctgctttttagtcttgcacttgagggacaaccaaacttaaatttctggtcatcctttcagaaaatatgtaggactatacaaggatttgtttatatctttcataaatatttacacaaatggtatcatattaagcctattgttctgcaccttgttttaatacaacttacacattaactgttatattctgttgaatcgtgtggatatattatatttatttgcctggaccctgtttttgcacatttaaatcatgcctaatttttattacaatcattattgaaacaaatatgtactttaaaatttgtttttagttattgtcaaatactccttcaagagtaccactcctcactcctaccagtagtgaatgagtgcctctgtttctccttacccgcaagtattgaggaagttgggtttggcaaatgttaaagtatttgtcaaactgctacattaaaatggtatcttattattttaaattgcactttttatccatgaggttgagtaacttaataatttatagcccatttttatttctttttccttttccaattgcttatgcactttttttttggtttttctttcctttttggcttgtagaaactcttcatatggtaattaaccatttggcacatttgttgcaaatattttcccccacattgtcacttgtctgtttcttctttgcttgttttatagtctatattaggccctagagaaatcttagatttttacatactcttattgacatcttttattacggcttctgtatttacttgtttagataggtgtttctctctcaaagactatctctctatatgaatgtagatatattttcatctaaaatttacacttgaattttgattcctgtggaagttattttagtttaaggagtgatattgatgtttttagttttttttccacatgactaattatgtatcctggtagcattaattaaataactaacctttttccaagtggtttcaaacaccactttcatcatatattacggtcccatatttatttaaggttgtttctggactctcttctgggcatttggcttgtccttcttatcctctgtttaaaattatattgtgggtatttcatcaaccagttccttaaactgctaatgattcattggtgaagatagaagtaatttatttgcagttactaaagttaaaacaggtagagatttttggtataatatcttcagatagaattagttttcctaagttctgtagtttcatgtctcaccttaggcatctgcctttgtatacctcatatcttgttgaacttttaaaatcaccagatgagtagaattcctattattcttatcataggttggttttagggaaatttgccagttttatgttttaatatttttggaaggaaaactgaaaggtaatgaaaatgttactgttggattaaaaaacaaattaagtccaaatagtgattaggcaagttggtgaggtagggggttgctgcaagagcggaagttgaaagatcttggaaaaattaaagaaacttcatagaaccccatctctacatcaaaaaaatacacaaatcagcttggcgtggtggtacacatctgtagtctcagcttctttggaggctgaggtgggaggatcacctgcttcagcctcgcaggtggagccaaggtgatgccattgccctccaggctgggagacagagtgagaccctgtctcaaaaaaaaaaaacaaaaaaaacagacaatggagatataaaagcaagggaaggaagtgttcaaaattgaagagaaccacaaaaataaacataaattttgaaagtgccaaatagtagtcagatgtaaaaaatttttgaatgtggaattgtaaaatgagaaattacattatggaaatgaacttcagcaaattgggtatcatcaaagatgattagtgccataaatagtcattataagaactccaaattagcgagaaatccaagaagaaggccttttctcaagtgtgcagtttttctatgttgaacagtattagtgagaactaaaggaaagagaggaaggtatgcagcaaataaaagcactagataagaaactagttgttaattctcattggaggagcatttgtcagtgaatttttaaagaaatgagactcttcgatctgctaagatttatgctttgagaaactcataatttatctgtttagcagttcattagaaaagaatatattccatctttcaataacatgattcagataatgtaactcaaatagcgtgaagtagaaagtacttaaaatatttggtaagaggccttggaagaagaaaaacatgaaaaagggcacctgttgaaatctgggtttcagaatgtggaaataacttacagaaaattatataattttaattatataattatacaatgtattcatttgctagggttgccataagaaagtaccacaaactgggtgacttaaacaacagaaatgtattgtttcacagttccagaggctggaaataggatcaaggtgtgggcagggttggttccttctgttggcggtgagggagaagctgtttcatgagtttccccttacatctggtgtttgctggcaatctttggtactccatggcttgtggatgcatcactccaatctctgtctgcatgtacacatggcattctttttatgtatttgtctttttccagatttcccctatttatcaggacaccagtcatactggattaggggtccaacctactccactgttatctcattctaactaattaaatccacaatgctgctgttttcaaacaaggtaacattcagaggtactgggagataagccttgaacatataatatgattttgaggggggcacagttcaacccgtaacacaaagtatctgttaagccaagagccccagtctgattgccatctgttattttatgacgtcactgggcttaagaaaattgtatatgtggtgcattttattttgtgtaggggttgtaggaacatgactgttaaatatttataaagcaactcttaattccgaagtgcttaaaacgttgtgcatgggccgtgaagtcaaatctgggttcagaccttaactgtgtgtattagtccattctcatactgctgtgaagaaatacctgagactgggtaatttataaagaaaagagatttaattgactcacagttctgcatggctggggaggcctcaggaaacttacaatcatggcagaaggcacttcttcccagggcggcaggagagagaatgcaaaccaggcaaagggggacaagctctttataaaaccatcactcccatgattcaattacctcataacaggtccctcccacaacacatggggattatgggaactacaattcaagatgagatttgggtggggacacagccaaactgtatcattctgcccctggcccctcccaaatctcatgtcctcacatttcaaaacacagtcatgccttttcaacagtcccccaaagtcttagctcattccagtattaacccaaaagtccaaatccaaagtctcatctgagacaaggcaagtcccctccacctgtgaacctgtgaaatcaaaagcaagttagttccttcttagatacattgagggtatgggcagtgggtaaatacacctattccaaatgggagaaattggcaggcagccaaatcttaaaggtccaaaatgatctcctttgactccatgtctcacattcaggtcactcttatgcaagaggtgggctcccaccaccttgggcagctccgtccctgtggctttgcagagtacaagcccccctcctggctgctttcacaggctagcattgagtgtctacagcttttccaggtgcacagtgcaagctgtgagtggatctactattctgggatctggaggacagtggccctcttctcacagctctactaggtactgcccagtgaggattgtgggggtgggggggcttcaaccccacatttcccttctgtactgccctagcagaggttctccatgagggctcccctcctgccgcaaactaatgcctggacatccaggtgtttccatacatcctctgaaatgtaggcggagtttcccaaacctcagttcttgacttctttgcacccactggcccaacaccgtgggaaagccgccaaggcttggggctgacaccctctgaagcaatggcctgaactgtcctcagagtggccttgaccccttttagccacagctggagctgaagcagctgagacacagggcgccaggtcccaagactgcacaaagcagcaaggccctgggcccagcccaggaaacccatttttccctcctaggcctccaggtgtttgatgggaggggctgccatgaaggtctcggacatgccctggagacattttccccattgtcttggtgataacatttagctccttgttacttatgcaaatttttgcagtaggcttgaatttctccccagaaaatacgttcttcttttctgtcacatcaacaggctgcagattttccaaacttttatgctctgcttcatcttgaatgctttgccacctagaaatttcttcctagaaatttaagaccttaaatcatgtctttcaagttcaaagttccatagatctctagggcaggggcaaaatgccgccagtctctttgctaaagcataacaagagtcacctttgctccagttcccaacaagttctgcatctccatctgaggccacctcaccctggacttcattgtccatatcattatcagcattttggtcaaagctattcaacaagtctctaggaagttccaaactttcccacattttcctgtcttcttctgaacctccaaactgttccagcctctgcctgttacccaattccagagttgcttccacattttcgggtatccttatagcagcaccccactctctacggtaccactttactgtattagtctgttctcatgctcctatgaagaaatacccgagactgggtatttctttttataaagaaaagagttttaattgactcacagttctgcttggctggggaggttcaggaaacttaaaatcatggcggaagtcacctcttaacagggcggcaggaaaaagaatgagagccaagcaaagggtgggaaagcccttataaaaccatcgcccccatgattcaattacctcccaccaggtcctttccacagcacatggggattatgggaactccaattcaaaatgagatttggatggggatgcagccaaaccatatcactgcttacagccaaaggtacctttggcagattactaaatttctctgagctttcagcttccttaactgattaaacaagggggataatgtctaagtatggaatgattatgtaattaaaagaaataacatataaaagtacttggtacaattcttggcacatagtagtagtctctcaaatttattttgtgaaatgtttatgttgggagtaaagcctacagttaaaaaattaaagaacagaagttgtcagacccttttatcaaagggggacaaagatgcagttgactcactagagccgggatacgtagcgtgtcatgtttgaacagattctcatgcaactctgttcagaaattttcttccaccaaatagttctatttaccaacctaaaaaaatagttaactctttatatgttttctgtgtattcttgatagtctttttttctttgatctatttattgtttcctacctttttttggttttccttattctatgtctttttttaaaaaaaagatatgttgtgccttttaaaaaatcacattgagatataatttacacacggtcaaattcacccttttaaagtatacagttatagttttcacaaatgcatacagtcatatagtcattaccacatgagtatataaaatatttccatcctcccagatagttctcttctgccccattgtagtcagttaccctctgtgtccccaacctctggtaaccactgttgcagcatattatatacatggaatcatgcagtatgcatctctttgtgtctggcttttaacttaccataatgcttttactactcatcatgttgttacatgtattcttaacttgttgctttttattgctgaatactgtttcactatagggatataccatattttgcttatgcattcaccagttgacggatatatatttgtttccagttttgagatacaataaataaggctgctctaaacatttgcatgcaggtctttgcataagcatattttcatttctcctgggtagatacctatgaatgggattgctaggttgtaaggtaagtatatgtttaactttataagaaactgtgaaactgttttccaaagtggcggtaccagtttaccatctcaccagcattatgtgaaaattccatttgcttggcatttttgtcagcatttggtattgtcacattttttgggttttttttttttttttaatcttaaccattctggtaggtatgtagtgatagctcattgtggtttccatttgcatttccctaatgactaatgatgttgcacatcttttcatttgcttatctgtatctcttgtgatgtttgtttaaatatcttgtgtttgttgtcttaatgttgagttatgagaattctttatatatattctggataccgtaacgtttgtcaggtacatgtttggcaaatattttctcccaatctgagagactgatttttatcactaacactaaaaatttatctacagttaagacctatttgaatgtgtattttgatgactttgctctaagttcttttttttatttatttatttttttttcagctaatttttttattatactttaagttttagggtacatgtgcacaatgtgcaggttagttacatatgtatgcatgtgccatgctggtgtgctgcacccattaactcgtcatttagcatgagttctgaacagcattattatttacttttttctatgttttgtgtatagaggcaacatttctcactgtttttacatttttattttttatattggatctgcagtggcactctgttgtttaaagtgacaaagccttaaatttaaaacttgctgacaactcgttaagtagtgcattcaccagggaagctggtattcctgttgagcttcctttgagtgagtgctgtgtaggcttggcctctgtctttttttttttgtaagtgagatagggtctcagtctgttgcccaggctggagtgcagtggcgtgatctcggcacactgaagcctctacctcctgggctgaagtaattcttctgcctcagccccccgagtagctgagactacaggcatgcgccaccatgcctggctaatttttgtgtgtttttgtagagatggggtttgaccatgttgctcaggctagtcttgaacttctagactcaagcaatttgcctgcctcagcctcccaaagttctgggattacaggcatgagccactgcacctggtcatgtctttattgaaggaagaaaattatggctgataaagaaagctgagctattctcttggtttccaatttagagaatatatattatccaacaattacgtattttaaaaatatactttccctctaatgaggattcatcacttgaaaaagattacttataaattaattatacggaaccaaaagactgagaagccatgaccagttgaatcttatctagattttaaggcagtctgtaaagtgataatgtctcaagggtgggagataggaaagggtaatgattcctgaaaacttacatataaacccagtttcataaagtaaggttgtctcctgttgtgaaagacttcaaatagtttcacttggctttttacaaggtaggaatttcatccaggtaaaggtacatctactttatcttcttatgaagaaaagaaatggggctaaaaactgtcgaaatcccaaaagacagggtggacaagagaggaaactacagaagacagcattgtagaaactggaaaacaaatggtcaagtgctaagtgagttagtaaatctgagaaacccagatcctaaactatcagttagggaagctcaaaactagatctacatcataattatataacattgtagcagttctggatacctcctggaatggagagttgggggtggagagtgtataaggaagatgagttatatgtcaatttaagaaacaatcaaatctctctatttcctccccacactggacctctatagagaaaaaaatcgtgggtgtctggtcttggagggtagaggagtagtcaccagatacaattgaaatcaaagtatcacactgaatacagaggagggattagggaagcaagcaaactagctactgagcctcacatgaccctatcccaccactattccccaacttccaaactctggccaacaaactttaatcctcaggacaggaggttgctggggtcttttctaagaatctgaccagcgtaaaagttttgacctaaagataacaatatagcttccctagcaaagtagcccaactagattatcctgtggtgaagcccatttttggtaaactcaaagtacagcctttgggtttcgagtcagaagattccctactgttaaaaatgagcagacagcaaaggactatcagtcatatgaagaaagtttccaatatgaaagagatcaagagaatcagtgcaacactaggaaacacattattcagatgtccaacaaaaagaaggaaatttgtcagtatttttaaagagagaagagtttttgaaatcatgaaaaagtaagtatactataaaaaaggaagaggttaaaaaagagctcttggaaattataaatatggtagcagtgaggaaagaaattagaagagttagaaggtagaattatagacatttctagaaagtaaagaaaaagatttttgtttttttaaaggtagtaaataggacataggtaaaattaaggaaataatccaggagttctaacatctgaacagtaggagctccaggcagagagaacagagcagaaagggattatcaatgaaataataaaagaaaaattcacagaaataaaggacaagagttttacattgaaatcatcaagcaaggtccagtataatagatttttaaaaagactcatgttaaagacacattgtgctgagccagaccactgggaagaagatcttggatgcttccagagagaaaaaacataacaacaaaggttaaggattcaaaatgactgtggacttctcaaaagcagtgctggaaactaagatgcaatggctgatgcctacattcttctgaagaataattattttcgacaatgaattatatatgcatccaaatcaccaagcgagtataaggacagactaaaagcattttaaaatatggtctcaacaaatttacctcttgttgttttaaaaaatattttagagatgcatacttacatgtctacagatgaaatgatatgtttagaatttgcttcagaataatgcctttggaagggtatgaattgatgaggatgtagattttaaaaaagaataaccatgagttaataattgttgaaggcaaatgatggtaagagggttcattattctgtttttttgcatatatgtgaaatttttcataataaaaagtaaaatacatccacagacacagacgtctgtcttctgctgaaagatatgccccatcaaaacaaggaagaattaaataagaggaaaatgcgatagaggttattgtactcaaagtgtgatctccagagcagtaacatcagtataaactgtgaacttgttagaaatgcagattctcaggcctgccccagacctaatggatcagaaaccctggatatggagtccagcattctttctttaacaaacccttcaaatgattctgatgcgtcctaaagtttgagaaccactttcctaaagcaggaaaaatagctttgctcaagtaaagaatggacatgactggtgttttgtatcatctcattttcttaactgcttgctctctggacgttgatagttgctctgacatgtaaatcaattgagttgttatacataaaaaatactgtattgtgctatttgttctaacaatctcaacaatcgatgtaaaagttcaaatttaaggaaactcttgagtatagtgattgtatcagaaatgggaagaggtatgaggggaacatatgaacatgccttataccaacctggctgcttgtctaactggcaccttgacattgtttgctgactttgtcaattgaaatttttattaatctggaatgccttttcctcctctggtatcaaaagcctgtctttcctcctgggctcaactaaaccacagcttttcaatgaaccactttagatctcattctcatctttctgtctctaccatcagatttttaaaattttatttatttattttaaacagggcctaatgctgccgtccaggctggaatgcagtgatgcaatcatggcttgctgccaccttgacctcctgggctcatgatcctcctgcctcagcctccgtagtagctgggactacaggtgcaccaccacacctggctatttttggggagtttttttgtttgtttgtttgttttttggtagagactgagtctcgctatgttgcccagactggtttcaaactcctgagctcaagcagtcctccagccttggcctctcgaacagctgggattacagtgtgagacactgcacctggccattactatcagattttttaaaatataaataaggactgagcaactatgacatgtgttgtgctggctattttatgtattatcaggaaaaaggtgaaaatgattagggagagagaaataaaggtaagaagagctacaactgtttttcatatcaaaccttgactcaaagagttcagaatgatttaactctttaaactgtgtgggcttctgagtagctgaagacagtggtaggtggtaggcttgtggtaagccgcatcccaaaatgttatctccctaaaagatacaaaataacttcacatctatatcattttgacatgaaacaacaccttgaacattacttgtagatagataatggcaaaactgcaaaataatcatgtaagaaaaaggtaacacactcaagtgcagtggtcctacatgcttttaccccattgccgcaaggggaccctgtggcaaggaaaattagaccaagatatgttccttgagaagacagaaggagcactagtgagggagagctggaagaaccaccggaaagattaaatccaccctttttttttgtattttcagtgcaaaaaactaaccagacagatcagagcaggattacaggaaaaggatttcaaagtataagtactttaaagggctagacagccatttaaatgtgatttaaagagacacacttctgaatgtctaacttctggaagacagaaaaggaaaacaaaagagttctttggaaattggatggtcaaggaaaaaatttttaaagacctgcaagaaaaaaaggaaccaaaaaatgagaaggcctacaaccctcttctctactattaaagcaaaactccactgaggtatctagactttggcaaacgacagaaagaaaaagatgccattaaacgaaggatattgaaaaaatgcccccaaatcacaaaaataaacagaaggaaagtgaaatcctttcctttagtttataaaattagggaaaaattcatacaaatcaactaaggaaaattcctctaatcccgtaaaactacttaagaagcaaaagaaaactattagtatacactccaaatagaactcaaaatatacaacacttgggtttgaagataagaagaaccaccttgagtcacaaattcaaaatcaagaacaaaaatgggtgaaaaccaggggaaaaatgcaaaaagaattgtactcaaagagatgaaagaaaatgacaatagattatcttaaatgaagaaaaaaagttaccagatactgaaaatagagtcaaatgaaaatttaggctgggcacagtggctcacgcctgtaatcccagcactttgggaggccgaggtgggcggatcatgaggtcaggagatcgagaccatcctggctaacatggtgaaatcccatctctactaaagatataaaaaattagccaggcgtggtggtgggcgcctgtagtcccagctactcgggaggctgaggcaggagaagggcatgaacccaggaggcggagcttgcagtgagccgagatcgcgccactgcactccagcctgggcgacacagcgagactctgtctcaaaaaaaaataaataaataaaaatttcgtacaggtgttgaagaaagagtagacaacaatgaagagaatgaaagtaagataaaaaggatcagaaaaattactgaaaatggaaaacagacaaggactaattttcatattactagagtctctgaagaagaaaaaaaggttttttattatactttaagctctgggatacatgtgcagaatgtgcaggtttgttacataggtatacatgtgccatggtggtttgttgcaactgccaacctgtcatctacactaggtatttctgctaatgctatgcctccccttgtccccaacctcccgacaggccccggcgtgtgatgttcccatccctgtgctcatatgttctcattgtttacctcccacttctaagtgagaacatacggtgtttggttttctgttcctgtgttagtttgctgagaatgatggtttccacgttcatccatgtccctacaaaggacatgaactcattcttttttatggctgcatagtattccatggtgtatatgtgccacattttctttatccagtctaacattgatgggcaattgctgttgtgaatagtgctgcagtaaacatacgtatgcatgtgtctttatagaagagtgatttgtaatcctttgggtatatacccagtaatggcattgctttctagatccttgaggaattgccacactatcttccacaatggttgaactaatttacactcccaccaacagagtaaaagcgttcctatttctccacatcctctccagcatctattgtttcctgactttttaatgatctccattctaactggcgtcagatggtatctcattgtggttttgatttgcatttctctaatgaccagtgataatgagctttttttcatgtttgttggccacataaatgtcttctcttgaaaagtgtctgttcatatccatcgtccattttttgattttttttcttataaatctgtttaagttccttgtagattctgcatattggccatttgtcaaatggatagactgcaaaaatgttctcccattctgtaggttgcctgttcactctgatgatagtttcttttgctgtgcagaagctctttagtttaattagatcccatttgtcaattttggcttttgttgccattgcttttggtgttttagtcatgaagcctttgccaatgcctatgtcctcaatgatattgcctaggttttcttctagggtttttatggttttgggtcttacatttaaatcttgaatccatcttaagttaatttttgtataaggtgtaagggaggggtccagtttcagttttctgcatatggctagccagttttcccaacaccatttattaaatatggaatcctttcttcattgcttgtttttgtcaggtttgtcagagatcagatgtttgtagatgtgtgggtgttatttctgaggcctctattctgttctggtctatatatctgttttggtaccagtaccatgctgttttggttactgtagccttgtagtatagtttgaagtcaggtagcatgatgcctccagctttgttctttttgcttaggattgtcttggctatatgggctctgaaaaaaattttctttaatgaggctttatttaaaaccataatcaaggaaaaatgtctcagaatagagaaagaggctggaggtacccattgaaaaggatactgggtacttgggaaaattaacccagaatgataaactgtgaacagtaaaactgttagatcaaatataaaattcttcaaggaaaaggaacaaatcataaaagcaaaaataattggattagcaccacactttacaaaattaagaaagaaggcaacagggagcagcgtttttaaacttagaaaaaaaatgtggatcaaggattttatgtccaaccaagtagtcctttaaatatcaagtcttttgaaaagtgattttaaaataagctatgtacaactttgataaaaattaaaacttaaaatttacagtttagcaatactatatgaagtatatttgcaaataatttattagtttttaaattcacactttttagtgataaatttgcaagttctatataaaagtaaatcttttttggaagaaacaacattttcaagttactatttttgttgtttagaagacttgaattggcaagaattcatttttttaaaaaaaatattatgagtacatagtaggtattaatggggtagatgagatattttgatacaggcatacagtgtgtaataatcacatcgtggtaaatgcagcatccaccacaagcttttatcatttctttgtgttacaaacattctatttttagctatttttaaatgtacagtaaatttttgttcactctagtcactgtgttatgctatcaaatactagattcttattaattctatctaactatatttttgtacttattaaccctccacactccctccctctaatcttcccagcctctggtaaccatcattgtactttctgttttcatgagttcaattctttttatttttacctcacacaaattagtaagaacatgcaaagtttgtctttctgtgcctggcttatttcacttgacataatgtcctccagttccatccatgttatttgaaatgacaggatcgcatcctttttaatggctcaatagtagtccattgtgtatatctaccacattttctttattcgttcatctgttgtcggacacttataatggccattataaatgggatgagataatatctcattgtggttttcagttgcatttctgtcattagtgttgttgaataccttttctcatatgtgcttgcccagtgtatgttgtcttttgagtaatgtctattcagatctttcaaccattttttaagtggattactagatttcttcttatagacttctctcatctccttgtatattctggttattaatcccttgtcagatgggtagctttcaaatattttctcccattctgtaggttgtctctttgttgattatttctttatctgtagagacgccttttaacttgatgtgatctcatttgtccatttttgctctggttgcctgtgcatacgtggtatttctcaagaaatctttgaccagtacaatgttctggagtttccccagtgttttcttttagtaatttcagagtttgaggccttagatttaaatatttaatccatttgatatgattttaatgtatagcaagaggtaggggtctagtttcattcttctgcttatgaatatccagttttcctagcactatttattgaagcgactgtcctttccccaatgtatgttcttggcacttttctcaaaaataagttcactgtaggtgtgtggatttgtttctgagctctgttctgtttcactggtctgtatatctgtttatatgccagtaccaaactgttttggttactatagctctgtagtataatttgaagtcaggtagtgggattcctacagttgtgttctttttgcttaggatatctttggctattctgggtcttttgtggttctgtatacattttaggattgtttcttgtggtttggtgaacgatgtcattgttattttgatagggattgcatcaaatctgtagattgttttgggtagtatggacattttaacaatattgattcttccagtccatgaatatgtgatatctttccgttgttttgtgtcctcttcagtttcttgaatcgctgttttatagttttcattgtagagatctttcacttctttggttaagtttattcctaggtatcttattttatttctagctattataaatggaattacttgatttctttttcaggtttttattggcatatagacatgctgttgatttttgtgtatgtatttttgtatcctgcaactttactgaatgtatcagttctaatagttttggtggagtttttaggttgtttcaaatataaggtcattatcatttccagataagcataatttgatttctttctttccaattcatatacccttcatttctttctctttttcaattgctctagctgggactttcagtcctatgttgaatagcaatggtgaaggtgaacatctttgtctttcagatcttacaggaaaggctttcacttttgttccatttattatgatacaggccatgggtctgttgtgtatgacttttattatgttgatgtatgttttttctatgcccagttttgtgagggtttttatcatgagaggatgttgaattttatcagttttctcagcatcaatttaaatgactttatggtttttgtccttcattctgtggatataatgtaccacgtagatttgcgtatgttgaaccatccttgcatccctgggataaattccatgtggtcatgatgaataatctttttaatgtgttgttgaattcagtttgatagtattttgttgaggatttttgtatcaatgttcgccagggatattggccggcaattttctttgtttgatgtgtctttgtctgtttttggtatctgggtaatactagcctcatagaatgagtttggaagtatctcctgctctgtttttcggaatagtttgagtaggattggtttagttcttccttcggtgttcagtaacgttcaacagtgaagccactgggtctcaggcttttctttgctgagactttttattacagctttgaccttacaacttgttattggtctcttaaggttttaaatttcttcctggttcaatattggtaggttgtatctgtctaggaatgtattcatttcttctaggttttccaattcttggcatatagttgcttatagtagcctctaataatcttttgaatttctgcagtatcagttataatgtctcccttttcatctctgattttatctatttgggtcttctctctttttcttaggttgttgatcaaaggtttgtcaattttgtttatcttttcaaaaaaccaacttttcatttcattgatcttttgtatttttttgtttcaatttcatttgtctctgatgtttattatttattctgctaatttggggtttggtttgctcttttctttctttaagatgcatcattaggttgtctatttgaaggttttctacattttttatctaagtgcttattaatataaatgtccctcttagtactactttcactgtataccataggctctctttcctttctttttgttctttttttttttttttttttttttttgtatttttgtgtagacagtgtcttggtttattgctcaggctcatcttgaactcttgccttcaagcagtcctcctgcattggtctcccaaaatgttaggattactggtgtgaaacaccactcccaacctcccatgtatgtttttgtgtgttttatttccactttcatttgtttcaaaaaaattgtttaattttcttcttttttcattggcccaaactggtcattctggagcgtgttgtttagttccaagtttctcttgttattgaattgtagtattattgcattgtggtcagagaaggtacttgataatgatttcagttattttgaattttttgatttattttgtggcctaacatatggtctggccttgagagtgatccatgtgctgaggagaatgtgtcctctacaactgttgtataacatgatctgtaaatatcttttaggtccatttggtctatagtatagattaagtctgatgtttcttgattttctgtctgaaatgatctgtccagtgctgaaagtggggtgttgaagtctccagctattgtataatggtctctctctttagttctgttaatatttgctttatatatctgggtggtctagtgttgcatatatatttactattattatatccttctgaattaacccctttgtcattatgtaacgaccttcttatttcttgttggttttgtcttgaaatgttgtctaagaatagctaagcctgctattttttgctttccattggcatggaatatctttttccattcttttattttcagtctgtgtctttatagatgacgtgtatttcttgtaggcaacagatcattgggtcttgctttttttttttttaatccattcagtcactctgtcttttgattggagagtttagtccatatacattcatactgttattaataagcaaggatttactcctgccattttgttatttgttttctggttattttgtggtcttcttttttttctttctttcctgttttttttttctttttatgttcgtgtgccggtgattctctctggtggtatgttttaattttttgctttttgtctgttgcaggttttgtctgttgtctgttgtagattcgatgttaccatgaggctttcaaataacaagccattattttagactcatgataacttagcactggttacaaaaagaaacaaactaagaaacagagagaattcataaaaactctataattttatcaccccccacttttaaactttttattgtttctctttatatgttatactgtctgtgtcttcaaaagttgatgtagttatcattttttgtaggttcatcttttagtcttactactcaagatatgagtagtttacacaccacaattaaggtgttatatattctgtgattgtgtacatactattagtgatttttgtaacttcagatgatttcttattgctcgttaatgtctttttttttttccccagactgaagaacttcctttagcagctcttacaagacaggtctagtgttgaagtccctcagcttttgtttttctgtgaaagtctttatttttccatcatgtttgaaggatatttttgctggatatactattctaagataaaagtttttttcagcactttatttcatgttctataatgtttctactgagaagtcttctgctagatgtattggagctccattgtatattgtttcttttctcttgctacttttaggatctttatgcttaatcttaatgccttgatgtagacttatttggattaaatcttcttgatgttctataaccttcttatatgttcatattgatctctgtgtttgttaatttctctgttgttatcgctttgaatcaaactttctaccttcacctcactctctatttatactttaaggccagtgactcttagagttgcccttttgggggtattttgtagatcttgtaggcttgctacattctttattctttttttatctcctctgactatattttcaaatagcctgtcttcaagctcactcattgtatcttctgcataattaattatgctgttgagagacactgatgtatatttcattttatcaattggatttttcagctctagaatttccacttgatttcattaaatttgtacagtttgttaaattcagataggagtctgaatttcttctctgtttatcttcagcttcattgagctaactcaaaatagctattttgaataccgtatcttaaagggcacatttctctgtcattctgggatttatcactggtgccttacttagtttgtttggtgaggtcatgttttcctggatgttcttaatgctatggatgttcattgatttctggtcattgaaaagttaggtatttattacagtcttcgcagtgtgggcttctttgtacccattcttcttaggaaggttttccaagtgttcaatgggaactgactgttgtgatcagtccctagttgctatagcggtatctgcattaggtggcaccccaagcctagtaatgctgtgactcttgcagactcacaaatagtactgccttgctgatcttgggtataatccaagagaattctctggattaccaggcggaaactcttgtcctctaccctttcccctaaatggagtttctttgcgttgagctgcctggagctggggtaaaggtgacacaagcaccactgtggccactaccactgggactatcctgggtcagacccacagccaccacagcactgggtcttgcccaaggcccacagtgactactgtctgactactgctggtatttactcaaggcctaaaggctctccagtaggtgtcagtcagtaggtgacaaatttagccaggctatgtccttccctttagggtggcaagctaccccctgggccggggcctggagtcagaatccttaggtgtctacttggtgctctattttactggggctgaactagcacccaagccacaagtccttccactcttctcttacctttcctcatgatagagtgccttcgtgtgttaaccaccaccccaggcctgtaatgagtactgcctggatactgccaatgttcactcaaggtccaagggctctttagtcatcttgtggtgaatcctgcaaggcctgggtctctccttttagggtagcgagctcccttctggcccagggctggtctagaaatggcatccaggagccaaggcctggaatttgggaccccaagagcccatctggtgctctatcccaggaaagaagtagttttagaagctaagttaaggtcattaaaatatatttttatcaagtaattataatcaaataagttctggtaaggtcctgtaacattccggtaacattgtaaaaatatattttgggatctctgacatcccattattttgtatgctaatcctactagattgtgattcatatgagaggagagatcatatataaccacaaaattagcattttcttttattatcattgtagccaaaaatcacagtaatattgtcagtgtccgtgccttcgagagcaaaaattaaagacggggttttgttttatttagagattctcagaattgaagagttaaactaatcaagcagatacatcaagtcaatatgttatatgaaagaactggaaatgaataattaatagttataattagctttcctatatattttcctgaaaaatttgcagttaagatttacaaacagaaaacaaattgtttaagatattttacatttggggatgatatagttattcagactgactttgggagtctgttcctcttaggctgttaagcacatttttattaagtagcttttgttattttaacatcttttattgtagggtgggctgggaaggtttctctggctaaatattaccgtattttaattagtttgatgccactaaatttaaggtgcaccgtataattatatactatagtaactattcaaatttatatcatttgtaggatatatccttatttcagggatgtaaaactgtgtgtgtattggggcagtttttataatgagtgaaatggggaatttgagaagcagtctgaaggtgggaaaggaatgagtcatgccatttagaagaagtggtgaccaggtgagaaggaacagcagttgtaaaggacaaccaaagctagttaaagaaggccaatacgactggagcagagtagacacggggaaagcaaagtggtagtgaggcctggttgtggagagccttgtggatcatccataaggactttgactttaatgctgagcgagatgggaagttgctggaggtttgagcagaggagtgatttgatccgtgcaacaggatcacttgggctgctgtgttaagaatagattgtaggaggcagggatggaagcaggaaaatagaatcaggcagcctttaaaggctgttgcaggtaatccagatgagagatgctggtggctgggaccagagttaacagtggtggagattacgaaaagcacttggattctggatttcttttgaaggcaaagctgacaagatttgcagatttgctaatgaattcctatggagtgtgagagaaatgagaaatcagattattcaggtcgaagcaactgtattgttaccatttacagaaatgtggaagccttcttgaggaaggcaaatcagatgatcaattttggattatgttgagaaggctgttaggcattatcagaagataatagagagagcaactgagtaaaaaagtctggagaccagggaagagggcccagttggagttatgtgtatgcatgcacacgtatgcgtatattacgtagggcatgtatgcgtgtgagtttatcgtttgattcttgcagcattgacgattgcttcagaattccatttttcccccttgtgtttagtctgtgattttattattagaggttttcttcaaatgtctgatgagctttggctctccttaacaatgagatataaggagagattaagcaaccagcttctacaaaggactttcatgagggaaggaagaatagagttgaccgatggtgtatttttaagtatcgtttttgttttttaacttattttgaaatcatttcacatagaaaagttgcaagaataatgtaggtaactcctgtaagtacctaggttcagaatattatgtaaatgatgtagtgtttttctcagggtatcacattagagacatagatagtggtccctcatttgacagtaatttcaagaatccagcaaagggccaaggggttgtctagtttttcttctttgtagtttctgtatctccttgaaactagaaggtaaggtccatggaatatatgttaagactgtgtaaacaataagataccatctcacacctgtcagaatggctattattaaaaagtcaaaaaacaacagatgctggcaaggttgcagagaaaaggtaacacttacatactgttggtgggagcataaattagttcaaccattgtggaaagcagtatggcgattcctcacagagctaaaagcaaaactaccattcaacccagcaattccattactgaatatatacctagaggaatataaatccttctgccataaagacacatgcactcgaatgttcattgcagcactattcacaataaaaaaaagacatggagtcaacctaaatgtccatcagtgacagattagataaagaaaatgtggtacatagacaccatggaatactatgcagacataaaaaagagtgagatcacgtcttttgcaggaacgtggatggagctggagactattatccttagcatagtaatgcaggaagagtaccacatgttctcatttataagtgggaactaaatggtgggaactcattaacacagagaagggaacaatggactctggggtctacttgagggtagagggtgagaagaagaagaggagcagaatagataactattgggtactgggtttaatacctgggtgatgaaacaatctgtacagcaaacccctgtggtaagagttcacctatgtaacaaaccttcacatgtacccccaaacctaaaataaaagttaaaaaaaaagactgtaaaaatcttattccatcatcatccttttctctaatttagcaattatttatgatgcctcacccactgaatcttagtttaataatgtttgcaaagtagtgagttttttaatgctgcaagcattgcagagtttatcagctagcatattattattaaaaactcaacaaaacacagtctttttttttgtcccatttaatatcataggggacttacctgtttctgcttaatattgaatgtgttataatccattactgtacttatatattttgatgatcaaaattgtcctagatatggctaatagaagcaccttcgagctgatttcttggtccttttgacaaacgcgtgtggcttttttttttttttttttttttttttttttagtacttactttcaagctcaagattttccggattcatcttatcttacacctcccttgccccagtcctggaccatttctctgaggagccttgcttgctttggatggagaaatagtatcagatagggggtagagggtgagagtttcactactcaatataggctttgccttgatctttctgttttgaacccttttcctcagctttctttgatagtgcttactttaggggttctttcaattcaacatatccaaatagaaaacctctagtcttctgctagaagggtaatttggttatttttagggatggtgtctaagcagactaattgcttcttacttttaatcagttcttctgtttatagcttcagaggaatctagtgtttgaagttgctgattctcattctttttattctttctgtggttctttgacacaaataagattgcatcttatcttgtcctccgtcactgcacacttagatttccctagtcacctgtgacatcttaatttgctcgtttgctttcagatatctaaaatttgattgaattctctttttttgttgtgttttttcctcttttcttttcttttttttattttttttttagaggcagagtcttgctctgtcacccaggctggaatgcagcagcaggatcttggctcactgcaccctccgccctaagggttcaagcaattctcctgtctcagcctcccaagtagctgggattacaggtgctgcgccaccacacctggctaatttttctgtttttagtagagactgggttttgccatgttggtcaggctagtctcgaactcctgacttcaggtgatctgcccgcctcagcctcccaaagtgctgggattacaggcgtgagtcactgtgcccggcctcttccttctaatcttcttatttctagtttaatgcctttttttatcttttaagtggggtttgttaagtcaagatgaatgtatcaatctgccaccatatttacccacaggtcttatgtatttttaaatgaactttttttcctttaacaaaagtattatgtatcatttatggaaaatacaggtaagcaaatgaaaacaattagtaaatgaaaacaattagctctactcatatagtttagaggtagttactgttaatccttgatgtgattttttttatatatacaaacttgcttattaaaatagctggataatattctatagagtaggtatcatattaggctttttgttgttgttgtttggttgttttttttttttttttttttttacaacttattagacctttactctcattgaagtgaccttctatgaacttatatatgctatatatcattatggtcgggacatgagggtaagcaataaggcagttacaaaaccccagaaatttttagaaatcacactaagaggttttaaagactgtgccagaggagattttggtagtatcatagttcatgtctttcatgagctgggatgtagtttcatggaaacacaacagagagtagaaaacctaaccaattttaccgtattttatcttaaaaaaaaagactattactgtgttacatacagactttcaacctgccctgtcttcagcccagctgtacccttgatgttatggatcagagaaagccaagtaaggggagagccaataagcagtatcaaaatgaggccaagacatttagaaatttacttacaaagatggtttacaagagaatacagacttcagaagaaccaactctccaaataaaaatgctgtcagttttaaaggggggaaaataagattccaaagtttccatctagtctctacatagtaggaaaaacaaccgtttttcatactttgcatatgattatcatatctgcaaaggttatcatgtatcttcagataacacctttgcagaagtcaaggacatagggagtcagtagttaaaggaacagctcaaggttttgttaatttgggaatttgggggactttaaaactaagtgagatgactggatttttttttcccccatctcggagtacaaagtgtcttttccccttgacttttgaatgtgatgtgcaggcttttccatagttacgcagaacaaggcatcagttttgcctccaaggaagggcattatgcatggaaaagaaaaaccgaagtatttttcactgtctccagtgttgtttaggatagcagcagaagtattttactatccagttctgatggttttgatatatccaacaagttatcattttgattacctaactacctttgctctagtttcttattttcaagcctttaaatagaatgagaagcatgtgtgaataggtgggagttagaggttaaaattttagataaggtggcaaaggaagggattcacttgagtcaaaaccttaaggaagtaacagctaaacaatgaatatatttggaggagagtattctaggaagaggaaagagcggctctgaggttaattcaggggtatagaatttgtcgtggagagcactgaaggactttgaacagaggagtgacatgatttggttttccttttaatcattccgttatatatactaaatacatggtaatagatagtgataggtgcaaaaaaaaaaatcacaatttccatgcttttcttatatcttaacagagttgggatacagttatctgaagcccagtgttacaaattggaatcaagaaaacaacctctttaacttaccatttaattcatctacaacttaaaatgttttatgctgccagattatctaaagcttgtttcttttgtccacctttgtttgtgtttttatgttaaataaataatccctatgaattgatagagacagatgttttagagaagcttgtattgtttcaaaactaaattagtgttttttaaaacttgattttttattgaataaaaaataggttttttaaagcatataactgacatttgagtgcttttactattccaaacattgctcaaaatgttttcactatttgcacatgcaaaatgtggattatcacattctgtcctctcaaaaatccagtgaaataagttttattattacccccacattcatagataaggaattggaacttcagagagtttaaattgcctaaggttacaaaagtttatataccatctgtgacctctgataggctggaaagtaacataagcaagttctgtatatgaatatactgattccaaggaaagctaaattggtaattgttggaaaaagaaaaaaaaaaggctaatattaagcccccaagcaggaaaacaagtatctgaaagaacagacctttggcaagttttaagaaaagggaccccaggaacagtgtaattttcaaaggatatgttaatcgtggtattcaccgtgttttgcgaaaatgcctcaggagccatttggtgagagtgacaatgatcttgaggggaaaagaaaatggtagggctcttctttccttccccattcccatacattttaaaaatatgtaggtattaaagttaagatttgggaaggtggggcagcagcagacagggttctatcacttaaaacgaaaattgggaaaacattacactaaatttggtgctactggtcactaaaagtcttttcactctctttattttgatcccatgctgaaacttttatatttgatttttctgaataggattcttacaaggagcacatttaccagaaaattgaaatgtctggctatcatggcatttgttccttgctataaatcattaaattgtcagtatggtatgttcattgatacattcctaaatctcttagaagcatcgtaggttagacttgagagtctctctatgtctggggcactgacaagatgtagtttctagatttgcagaactttgtttacatgccttggactgtgggtattttcccagtatcataccatgtatgttaggtactagatatagctagttggcctcctttaacacctcagtcctcattgtgtcattagcctgcccagtggatgataatctcatgtagtctattagactccctcaaatagactacatgagattattagactcatatagtctaatagactacatgagattattagactcatatagtctaatagactacatgagattattagactccctctagtagaagaaggcataggagctttcttctactagtttcatagttttagatattttatttcagattttaattcacttacaattgaattttgcatatggtgagaagtaagcatttaatttcattgttctgcatgtggatatccagttttcctaacacgatttgttaaagagactgtctctctagtagagggagtctaatagactacatgagactatcatccactgggcaggctaaattcattattagtaaggctaaattcattattcttcagattggattagtgcctaaaatcatttatttttaactgacttccgtgatatactaagagaacagatcttctacttgattaagctgtgggttctactgtcaggtattttcattacaactttatttcaccaaactgtaactgtagcaggacgagccgcagacaaaacctctcagacaccgagttgtagaaggaagggctttattcagctgggagcattggcaagctactgcctcaaaatccgagctcctcaagtgcacaatttctgtcccttttaagggctcacaacactaaagatttcacatgaaagggtcgtgattgatttgagcaagcagggggtacgtgacaggggctgcatgcactggtggtcagagagaaacagaacagggcagggagtttcacagcgttcttctatacaatgtctggaatctatgaataacatcggtttttaagttatgagttgatttttaactactgggtttaggccaggcaggcccatgtccagttttgggcctggtgccgggctgcctgtctttggttttacttccctgttgttttttcttagaacaggtactgagtataaaataatatgagagggtctttctcttccttcataacaatgattaagattgacagccagcccttttattttaaagtaacttttttttacattttaaaaaaattaattttaaaagttgacatgtaacatgtatttattgtacacaacatgcttttttgaagtatatatacattgtgaaatggttaagtctagctaacaaatatattacctcacatagttatcatttttgcagtgagaatactgagcatccactctcagcatttttcaagaacatagtatgtaatcattaactatagtcaccacgttgtacaatttatctcttaaacttaatcctcctatctaaccataagtatgtgtcctttaaccaacatctccctaaccctcctcacctgctaaacactccagactctggtaactaccattctactctctatttccatgagatcaacttttttaagattctacatatgagggaaataatgcgttatttgtctgtctgtgccaggcttgtttcatttaatgccctccagattcattcatattgtcaaaaatgacagcattttcttcttttaaattcctgaatcagtcagatttggtggctcatgcctgtaattccagcactttgggaggtccagactggaggatcacttgaagccaggacttcaagacagcttgagcagcatagcatagcaagaccctgtccctacaaaaaatttaaaaaatgagctaggcatggtagaatgtgcctgcagtcctagctactgaggagggtggggcaggaggatcacttcaccccaagagtccaaggttgcagtgagctatgatcatgccactgctctccagcctgggcaacagagcaagaccctgtgtcttaaaaaaacaacaaaaaaatggctgcgtagtattccattgtgttcatatactatattttctttatccattcatctgttaatggacactgaggttgattccatatcttggctgttgtgaatagctataataaaagtaggaagtacagatgtctcttcaacatactgattttatttactttagatatataccaaggagtggcattactgaattatatggtagtttttttttaatttttcgaggaacctccatggtgttttctttagtggctctactaattcacattaccaacaagtgtaggaggattcccttttctccacactcttgccaacacttaactctattttgtctttttgctaatagccatttcaacaggagataatatctcattatggttttcatttgtatttgcctgatgatttatgacattgagcattttttcatatacctgttgacaatttatatgttttcttctgagaaatgtttgttcaggtgtttgtgcatttttttaattgggttattttcttgttattgagttgagttcctgatatttttcggatattaatcccttatcagagatatagtttgcagatattttctcccattctgtgggttttctcttcactttgttgattgcttcttttgctgtgcagaagctttttagtttgttgaaatctcatctattttttattttgttgcctatgcttttgaggtttcattcaaaaaattcttgccagaccaatgtcatggagcattgctcctgtgctttcttctactagtttcatagttttaggtcttatatttcagattttaattcactttcagttgaattttgcataatagtgagaagtaagcatttaatttcattcttctgcatgtggatatccagttttcctaacactatttgttaaagagactgtcctttccccattgtgtgtttttcacatctctgtcaaaaattagttggttgtaaatgcatggatttatttctggactctattctattacaatggtctgtgtgtctatttttatgctagttacctgttgatttgattcctatagttttgtgtagtatattttgaagtcaggtagtgtgatcctctccagcattgttcttcttgcttaagattcctttggctctttggggtcttttctggttccacatgagttttaggattaccttttctgtttttatgaaaaatgtcattggtatcttaagaaggattgcattgaatctgtagattgctttgggtagtgtagacattttaacaatacagtcatgtgtcacacagtgatgtttcagtcatcagcctaccaccttttctttttttttttttttttttttgagatgaagtctcactctgtcacaaggctggagtgcagtggcgcaatcttggctcactgcaacctctgcctcccaggttcaagcaattctacctcagcctcccgagtagctgggactacaggcatgcgccaccatgcccagctaatatttttattttcagtagagatggggtttcaccatgttggccaggatggtctcaatctcttgacctcatgatctgcctgcctcagcctcccaaaatgctgggattacaggcatgagccaccacgtctgcccagcataccacttctaagccagtagtcccataaggtcataatggggctgaagattatctatcacctaatgatgttgtagccatcataagaccacagcttaatgcataaccatttctatttttagatacacaaatagttacccttgtataataattgtctaaagtattcagtagagtaacatgctgtccaggtttgtagcttggaagcaataagctgtactgtatagcttaggtgagtagtaggagtagtaggctataccatctagatatgtatagctgacgaaatcaccaaaaagcatatttctcagaacacatccccattgctaagtgacacaagactgtataaattcttctaattcatgaacatgggatctcattccatttatttttgtcttctatttctttcttgaatgttttatagttttcagtgtagagatctttcacttccttggttgaatttattcctaagtattttattttctttttgtagctattctaaatgggattattttcttcttttttttccccagatagttcattgttagtgtataaaaacactagtgatttttttatgttgattttgttccctgcaagcttactgaattcatttattagttctgacggtattttggtggagtctttagggttttctatatataagggtcatgtaatctgcagacagggacaatttaatttatttcttttgtcttgcctaattgttctggctaggacttctagtactatgctgaatagaagttgcaagagtcggtattcttgtcttgttcaggatcttggagaaaaagctcaacttttccctgttcagtgtattagctgtgagttgttgcatatggcctttagtgtgttgaggtacatttcttctataactaatttgttgagtgtttttatgaaaggatgttgaattttgtccagtgctttttctgcatctattgatcatagggtttttgtccatcaattctgttaatgtgatgtaccacatttattgatttgtttgtgttgaaccattgttggatcattgcatcacttgatcatgatgtttaatttccatgtatgtgtgaattttccaaagctcctccttttattgacttctagttttataccattgtggtcagaaaagatactctatatgatttcagttttcttaaatttgttaagatttgttttgtggtctaacatatctattgtgaggaacgtcccatgtgtagttaagaagaataatatattctgcaactgaaatgttctgtgtatatgtgttaggcccatttggtccagagtatagtttaattctgatgttttcttgttaattttctctctagatgatctgtccattgctgaaagtgaggtgttgaatttccctactattattgtgtgtagtctttctctccagatctgttaatatatgctttatatatttaggtgttccagtgttggatgcatattatatttataattgtgatatcctcttgctgaattatcaatatataataacctttgtctcttttttagtttttgacttaaagtctatttcatctgatagaagtatagctattcctactgtcttttggtttctagttgcatagaatatctttttaaatctctttactttcagtatgtatatgttgaaatgagtcccttataggcaatatatagatgggtctttttaaaaatccaaccagtcactctgtgtcttttgattggagaatttaatccatttatatttaaggcatttatgtattgatagataagggcttaactgctgccacttgtttcctaattgttttctattcttactgtcattgtggctaagtgattatctctaatagtacatttgattccttgctttatatttattttttgtatttattgcaggttttttgctttgtgattaccataaggtttacaaaaaaaaatagttattttaaactgataacaacctaaaaataaactctttttactacactgtccctcagtgttttgaatttttgatgttacaatttacatcattattgcatattctttaccaaattttgaatccaggtttgcaaagttttctgttcttattctttgaataacctttctacctgtttgcctttctctactccctcttgaactctaatgactcaaaaatttgcttttaatgctatctcataaattccgtaagctttcttttattccttttcaatcttacttctttttttcctgaccatatattttcaaataacctgccttcaagttcacagatcttttgcttctttgattttgctattgatgttctttattgcatttttcattttattcattgtatttttcagctccagtatttctgtttgattttcttttaattattatttcaatccattaattttctcatcttgtcatttgctattttcctcattttgttcaatgtttctgtgtattttcttgaagttcattgagcttccttaaaatagctgtttgaattctttgtcagacttttgagacatctccatctcttttgggtttgtcattggaagtttattttgtctgtttgataaggtcatgtttccctggttgttctggatccttcctgttgtgcatctatatccgcatgttgaagaaataggtacttattggaatgtttgcagtctggctttatctggctctttatcagtaagcatgttgttagatcctgggcaggtcatctggtgtgatctctaagcccatgactgttgcaactgttacagcattaggctttctgtacccagaattaccatggtcagtataacaatagactagaatctgttgttaccacggctggcacagctctggggtgcatctgaaaatcatgaggcctacctgttactgaggtttgactgaaacctaaggctgctgtcatcatccagcagtgatgggagccagagattgagtccattttgtgagggctatagtttaccacctgtcactgggataggtgaggagattcagttcacagataccaacctggattcagttaccatgaggggtctgcctggcactggatttttactgtggcaggcccagtattaggaaccaagggaaagtcctacacttctctttttttcctcaagcagaggagatatctctgcattctgctgagtaggattgtgggagggttgacacagatactgtaaaattatcctttctaccctcttcaatgggtattttcttattagtatgccataaacaggtattgtgaactttcacttggttttctcagctcttttgaagatgtgttaatgcatggatagttattcaaaatgatgtttccacagggggatgatcactggagagtcctctttctccatctggctctgccttcttataacattaatttgtttcattacaaaagtaatgtctatccattatcaaactcttaccaaatacaaaaatttctaaagaagaaaaccacttgtaattctaacactaagggccaaccactttttgcattttgttgaatgtttaagtttttcacttacaaaaacttgtaaaatttagaagtaattgtacattcttaaaatcttgtaaaaatagagtaaatgggttccatttattcatccagtttccatctatggtctgattttacatagctatagtaaaatatcaaaaacaggaaattaacattggtacaactcaccttaatttatattttaccagttttacatatactcatctgtgcatctgtgtagttctatgcaaatttatcacttagattcttgtaacaatcatcacagtcaaattacagaactgttttattgccccatagatttcttatgctactttttttttttttttttcttttttttggagacagagtctcactctgttgcccaggctggagtgctatggcacaatcttggctcactgcagcctctgcctctctggttcaagcgatcctctggactcagcctcccaagtagctgggactacaggcatgcaccaccatgcccagctaatttttgtatttttggtagagatggggtttcgccatgttgaccaggctagtcttgaaccctgagctcaagctatctgcccacctcagcctcccaaagtgctaggattacaggcgtgagctaccacgtccggcttcatatgctacctctttatagttacaactttctcccttcattctactctctaatccctaaccgctggaaaccactaagctgttctgcagtcccataattttattatcttgaggattttataaaagtggaatcatacagtatatagctttttgagattggcttatttcactcagcataatttccttgagaatccactaagttgctgaatgcatcaataattggttcctttttattgctgggtagtattccatctctgtaccacagtttaggcattcaccaattgaaggacatttgggttatttccagtttggggctgttacaaataaagcttttatgaatatttttctgtatgtttttgtgtggacattagttttctgaattttatgttcagcattcaataaagaggatcacctggaaccagaaaccacattagatattttagcagaaagtgtttaatataggaaattgttcaaacagttgtgggagaagtgaaagaataaaagaaaaacattgaggtaatacagaagtgataattgcaaggaccagcttctaattcttagactacagcaacaaagagaagtggtttgggttatcagaacctgtaagtatggagggatagtcctgcagaggtgggactcagaagaaaagttgctgcctgctggtgtttgtaccattaccttaggaccctcctggaatgaggcttaataaacctctgagctgaaagggccacctagctaatgagtacttccggaactcagagaaaggatctctgaagagttgaggctcagctggagagggttgctctttatctgctcttgttatctcagaagcttaaaggaagtgctttgtgcagctgggtctcagacatctagaagggggattatagctcgtgtatcttatactcgaatatcccactaatctgtaaaggaaatgttgtggagcgacacctcatacaactaagaagtggcgcatgcgtagctggtactggcatctctgaggtatctagatgaagctggtccagggagttttaaaagaaccttttgagtggaactgactgccactgccagggctaaggacttttgctgggcagatgctgatggaaacagtgtgcagacagcaaggtgcaagttccttctatcttgttcctggcttctaatccttatctaatgtcccacattgacagaacccaataaaagggggctggcagaggagaaatatagtttgcagcatcccagttccagtagcacaaaacagtatatagaagggtggatttaagagagataataggttgttaagtggcattcttatcatcaaaatcctttttgcttttgaggaattccccactatgtgagtggaaggtctccttcaaatgatctgtaaagaccagatacttaattgcttcctctatcctacaatctcctatcttgttaactccccttagttagcatatgggcatatgaattaggcctaaactatcagaatgttgcgctgtccttctctacccccccttttccttgttttcctctccagccttactttgattctataacaggaccaatacagagaatcaagagacaggaagtttttcttctgatagtgctggcagcaggagaatgcagtttccagtagaagcagtgccagtagtggctttacagggtccagaagtggaagcagtcctgtccatacaaatggcacctgtggtgcaatcccagcaggggtttttgttgcctagtctaccctggctcctttccattttctgatctcagttctttgtatttcttagcaatatgaactgcctaataccttctaaatgaattccttttcttcttaagtgagcaagaatcaatttctgtggcttacaatatagagcactgattgattcatcttgtttgtacctaataggattcatttagctgtcttgttgagtaaagaaattctaatattttgtgtttatttgtaaaaacagaaaagagatgctagacttagacaattttaagtcttcagcctcacaagtgtttggcaggatatttggaaattatcagatatcctactgtcagggtagaatagggtcaaatctccattgtgatggtggtgctaagtgtctgtaactctaacagaaaaatcagccaaccatttttctgactggtagaacctgggaaagttacttgctttaaccagggctattagaaagcaagttgaaaacttgaaaaaggagagagctagaggaagggatctcagaattgtatatataaactcttcaagtctctggttgactcctgaaccatgcatgtgtgcacctgactgagagcagtctgaaccatgtccgtcatggcagagatgtgagagagctaaaactccattaaagaaaacctgccatcattttagctgtaggaaccaggcaaaagaacctagatagtaaggagataatcctaaattacagcgccagagaaagagaacctaaaattctgagtataaaactccgggccacttgcggtggctcatgcctctagtcccagcactttgggagatcaaggcagatgggttgtgtgagtccaggagctcgagaccagggcctgggcaacatggcaagaccttgtttctacaaaaaatacaaaaattatccaggtgtagtggcatgcatctgtggtctcagctactccagaggctgaggtgggaggatcatgtgagcccaggaggcagaggttgcagtgagccaagattgcaccactccagcctaggtcacaaagtgagacgctgtgtccaaaaaacaaacaaaaaacactgctcaagtctttaccagaccaccctgggcaacaatgcaagtttgggccctagccttctgggtgccaagaaggggaaagaggccttaaatatgaagacttttctttatctgcttgccttcacccgcatcccccatagcaccctgtaccctattctctgtaagaatgtctgatttagtctgtccagagggtggagagtagggcctctaatgttactatgcggtaggtgagtagtcaccaatgcttgggatgggcatgtggggtttcaggggtctagttgcaccttttaatgactcagtcaattctggtctcagctccatccatgccttaacctctagtgctacctgctgcctccagttcctttacttctccaatgttgtgtgcaaattggcttgattcttttgtcttcttttccctggtagatttttaattttcagttttctcaagcctgtgaaactggtccagttttcccatagaactgatgtttatggtttcttttgcataaacctagcacttgaccctcccagtcttgaaacttgagaaagttacatttgtcttatctgaattcctttctcaggaagccaaccatcaggcctcccaggtagtatcaaagaactgaaaacttaccagatcactgcatctggacaatgagatgccagaactcttacctggcataagtgcctaaccaaccacctgcttcctgttgagcaactccttttccttacccctccctaagtcttatgtttccacacatggttatatttcttccctcctctatagacccctgattttagttaatcggggagatagatttgagactgacctcccgtctcaactttagcaccctataaagccttcttccctggcaataatcattgtctcagtgattggcttgctgtgctgtgagcagcaggacctagaccaaacccctggtgttttggtaacacctgttaagtcatttaccacattccaactgtgaattttggtgataagttttttctttttcttttggacatttatgtctcttttgttcctataaggttattttggtagggagtaggtataagtgccatggatttattcaccttttgaaatttttttgtccttaacagtgagtgttgacatgagaaaatatggaacccacttttttatagatgtctttttcctgtagcatgcattcttagtggtggtgatacttggttcttcgggagggttgaaatcatagataaaacaatggtttatggccccaaaaaattctaatggacaaaaatcttatccttagtatttaattgtggggtagagggtttggtaatgcaaaaaccttgagaaacagtgtcctatagcatttcctttattcttgaaattaattaactttacagaatatatattcgtgttaatctttctgtgtctgtttttcctgggcatagtgtgtctttctgttatgtatgttatattttcatgtttgaaaacaccagctaaagtatttgctttatctcctttgatactctacattattatatttctttcattttgtgcttttctcaaatctgtttaacatgtccatgacttttttttttttttttttttttgagacggagtcttgctctgtcgccgggctggagtacagtagcgccatcttggttcactgcaacttctacctcccgggttcaagtgattctcctgcctcagcctcctgagtagctgggactacaggcgcgcgccaccacacccagctaatttttgtatttttagtagagatggggtttcaccatgttggacaagatggtctcgatctcctgaccccgtgatccacccacctcgcctcccaaagtgctgggattacaggcgtgggccatccatgactttttaaacctggctttttgttgttgtttcccacgtttttaactctgttttttgtttttttaactctgtcagccctcttttcatcacttgtcaccttaattcttctttaaactttttagtctttttttcctttagatcgggggtcctcaaaccctgggccacagaccagtaccagtccatggcctgttaggaaccaggccgcacaccaggaggtgagtgtcaggcaagccgacattacctcctgagctctgcctcctgtcagatcagcagcagcattagattctcataggagtgcaaaccctatcgtgaactatttatgcgagggatctaggttgcacgctccttatgagaatctaatgcctgatgatcaaggtggaacagtttcatcccagaaccattccccgcaacctgtctttggaaaaactgtcttccatgaaaccgatccctggtcccaaaaagtttgtggactgctgccttagatcatatcttatatttatcacctctcaatgttttccatctaattttggcctctatcctacatttgtttctttctaataattacttctcagcaccaaaacaaggaaaatgagaccagtgaggaacttacctcaatcacaaaatttaaggaagcaagaaaaaactcaataatcaagataaatattttattgcaatattttttaaaaggactaaattactgtataatgagcaaaatatcaaaatttttaataaagacaggattgattgttactgaatgaaacaatctgttagaagtttggggcacatatgtgtgtgtaatatagtgatgtgagctttattgcataatacatcctcttaaccaaatctgtcatttcctttgccctgtagactcatcttctctcgttttttttttttttttcactttgttgagatgtaaaacttttgtgttattcacagactttctataccacttacaattcatgcttttctcttctgtgccacctatgctccagatcatagatggtagaaatggctcccttgtctgcataagaaggtgtttgccagagaaaatggtgaattatgagctatatgttcttttatttttctaaaactttaataagtatatttaacacattacaaaatgtaaaacattttaagaaatactggctggaaatataatgggaattatcatggagtaaaagtttaaaactcctgggctacttacagcaatagactgatcatctgctttactttatttggttctttagattagcatttcccaatctttttggcaccagggaccagtttcatgaaagacaatttttccatgtagtgggtgacgggggatggctttgggatgaaactcttccacctcagatcatcaaccattagattctcataaggagcgaacaacctagatcctttgtatacacagttcgttgtagggtttgtgctcctatgaggatctaatgccgctgctgatctgacaggaggcagagctcaggtggtaatgcttgcttgcctgctgcttactgcctgctgtgcggcccagttactaacagcccatggactggcacgggtttgtgacctagagtctggggactcctgctttacatagcatatgtttcatttcctccaagaagctattctcagtaattagacttgattcttaacatgcctggatatttataattcagttaaatttatgatcattatttatgaatgttggacgttatcgcttatgtctttctgtatttataattactgaagcaggatatgcattgtttttcccttttgcttctttctagcacactctacttctcatttgtaggtttattattgtccagcacatactgattcaggaaatttaacttgaatcctttaatcagtcagaaccatgatttcttatcttaagttgtttcatagcctaaagaaaatggtagagttagtttatattgtgtttgctaaataaactgatgagataaaaggtggatgttgttaagggagggagagaataaacaataaaccctgggaggagtacaggatgtaaattgtgttaagcaaataagttcactgtcgtgttgcccagagcggattcttttccctccaaggttaagaatctttttaggagaggatattgattgactctctctactgtatctggtggaaaaagaggtggtaaatgtgatgtattcctgtcatattttaattcatttattgagattaaaaacaaggatgtaaaacattcattttttatattcttgagtcaagagcactgaatcaaaaagttgacattttcactaaatgtttacaccttaatgcggagttttctctagatagctcatgtagatcttatgtaatattcattttatttttttcctttagctggaagtgctcctggttgttactatcaaagacatgtaaaagcctagaagttaattttagatacttaaagggaaatgttaacatttttatcttgctttgttaaatttcataagatttgataaatgagatatcaagaatatttaatgaaataaaattattaatgggcatttacttttgaataatggagtaagaaaaaagtagtaaatgtctactctaaaacttattttggccttaaaaaatatatatgcttttagctcggcacaatagcttgtgcctgtaaccccagcaacatgagaggccaaggtgggaggattgtttaaggccaggagttcgagaccagcctgggcaacatagcaaggctccatctttttttttttttttttttttttttttgagacggaggactcactctgtcacccaggctggagagcagtggcgcaatctcggctcactgaaacctcggcctcccgggtttaagcaattctctgcctcagcctcccaagtagctgggattacaggtgcccaccaccacgcccagctgatttttgtatttttagtagagacaggatttcaccatcttggccaggctggtcttgaactcctgacctcgtgacccacctgccttggccttccaaagtgctgggattacatgcatgagccaccgtgcccagccagcaagcctacatttttaaaaaattttaaaaattagcagggcatggtggtatgtgccagtagtcccagttgggaggcatgaggatcacctgaacccaggagttcaaggctggagtgaggctgtgttcatgccattgcactccaacctgggcaatagagcaagaccctcacctcaaaaataaataaaaataaaagttatccttttggtggtgttctcactagttaactcaaagcatttgatgaaaaatatcagctctgttttagaaatagatgtttgtagcatatgtgacaactcatttgtaagagtagtgagtgaaatttggcttttggtaactgtgcctttgtacattcttatcttcagacaagttatttgagcagaaaaataaaaagtaacaagtctcccaccagcacagaatgagtatgttcatgttttggctttggggtgtaacacttctaaggatataattagctttgcttttcattttctactttttctccacagcctcacgattttgatgaatgtcgatttgatattagtgtaaatgatagtgtttggtatcttcgtgctcaggatccagatcatagacagcaatggatagatgccattgaacagcacaaggtaagatccctaatgtttacctgtccatggaggactaggtaagagattgttgacaataccttaaaaaaaaagttgacatgtgacattagttactgaaacattgaacattatttggatgataaagattaaagcagttcatatgtaaatttttgaaataatttttatttttaacactttagttgtactaagggtatttgctatgataaatattactcggctgggcatggtggctcacgcctgtattcccagcactttgggaggccgaggcaggtggatcagctgaggtcaggagcaataccagcctggccagcatggtgaaatcccttttctactaaaaatacaaaaattagccgtgcttagtggtgagcacctgtaatcccacctactcaggaggctgaggcagtagaaccgcttgaatccgggaggcagaggttgcggtaagccaagattgggctactgcactccagcctgggcaacagagcaagactccatctcaaaaaaaaaaaagataaatatttttcattgttaactacatcaaaaatataccctttttcataaaacacatttcgattttttatttaggttttgcttcataataaatacctttttaatgatctaaataaaaggatttttgaaataacattggattataaaaccccaacttataaaagtttcaatgttgatttttgttataactttttgggtaaattcttagtacgaacatttgtaaatcagttattctttgtaaatgtgaggctatctaatgataaacctatagaaagtcttttttatataaatatataaggtacattcatataatttaagctagtctttgacttctgttaataaatattaagtagactaaagaaatacattaataaatctgtattattagctaattcagtaataccatgataaaacagagaacgttctaaatccaccatgtcattcttgagtatgacttaagagaagttttgcttgtttacgtacttgcctatacttgttcgtttgagtttcacaaagttgtagttgaaacacctgttttggttatttctaacaggcacaaaacacacacacacataccacacacacacacacacacacatttttaacaggcacaaaacacacacacacacaccacacacacacacacacgcgcgcctatacccatacacccaagaaaaaccagtctggcttgagaaagaaaagctaacacgattgataaagaagtatgcgattgtgaaatctcaggcactgttttgggtatttttaacaagcacaaaacacacacacacacccctacacccacacacccaagaaaaaccagtctcacctgagatttcacaattgcatacttctttatcaatcgtattagcttttctttcttggtttattgatttaagatttctcccagcctaaataaaattgactatgttacctttcttttttttctttgttttagctttaggactatatatttaaactttagtgttaagtttttaaaacattttctaagtcttagttatcttggtaatgttacttcagaaaagtctaaatatggaaaaaaattattgtttttctattatttaaaagagaaatgagctactattcaaaaaatctcaatgctctggagccaggccatgcatgcagcctctgccatgtatgacatatgtgagcttggctgtgttaattaacctcttcttagtgtttattctcagctgccatgttggtacttctgctcaaagtagtagtaagacataaatgagataatatgcaaagttacttaccagaatgactgatgtatttccccatttatggcatataggaaaagcaagagacttggagtctcaactaaattcactaaattataccatcttgtttctggatgaagagttttacgttaggtgagagaagctaaatgtgcatataaggagaacagcctgtttcatgttatttaatcagggccagccgtctcactagtgattaaagatgttattaagtagaattaatttctatatttttaatggagatgacctttaagggcttaatcagttgatttttattacagggcaagtttttttctgttttaattaaacatattttattttgctcacttttctctgttaagtccaatgacagttcctttgcaaggttcccgttttgtgttttcttcctttagtgaagattaatgcacgaagtatatatttctcctttagtgttgatttctttacatctttgaacaatggatagatttaatctttgggtctctctcagagcagtgggacttaagctgagataacaaattttgagtgatttttagttcctgaaaaaaatactcaactgcagggttgtgatgcattgtacaagtttgccctttctttttttttttttttttttttttgagatgaggtcactttgtcacccagcatggagtgtgatctcggctcacttcagcctctgcctcctcggttcaaacgatcctctcaccttagcctcccaagtagctgggactacaggcatgcaccaccgtgcctggctaattaattttttgtatttttggtagagacacggtttcgccatgttgcccaggctgatcttgaacccctgaactcaagtgatctgcccatgccagcttcccaaaatgctgggattacaggtgtcagcctctgcagccagccaccctttcttatttttaaagatagtttatttgtagactaggagaaatcattgttaattgttgttaatattatttaatgtactaaagtaaaatatgtgatgtatgccaactgagcagcctatcagtgaatatttaagtgaattcatatttagaatatgaattctaaaagtaaattgttgagttatttaacatgtaagaaggagaaatttcaaatgttgtcattgttttttttcctcccatagaccagggctagtgagatgtttcttgattcattcttcagtatcattaaggaatattgattgtggaagctaagtttagtaattttactatttaagtatgcattatcgtcttgatcctctatataaaactgtacaggcataatgatgataatgataggagctaacacttattgaggatcaccaagtactaatcattgtattaagtgctttatgtgttttattttctccctactatcctgaaaaataaagtagtattttgcagaagaggaaacaggtttagattaaaattaagtaatttgcctgagactgtactgtcttttagtttgtgatttctgagtattcaattttgtgttaattctcttgtctgtctgttaccattagtaaacggactgtttatgaacaattcccatgagctaacctcctgcaaattgtggtgtataatctgagttctcctactatacctatgcaagataaatatgaactcatttttcttttcgcccgtggattgtcaaacaggacagtatattatattggtaactgtttcagtagcggatttcagactccagagtctggcaaatgtggatttgaatcctggcactactatgtattagactagtgcaaaagtaactgtgattttggaccatgattttttaaatcattttaactaggctcaaacacatctttattaatcaaaataggaaccattacaatcaacacatttttaccaataagaaataagtttgtttattcctgtagcataaaaatctgtgcttcgggattctacaaactcttggaaagcattttctgcatcctgctggttgtggaagcattttccctgcaaaaagttgtcaagatgcttgaagaagtggtagtcagttggcaagaggtcaggtgaatatggcggatgaggcaaaactttgtagcccagtttgttcaacttttgaaacattggttgtgcaatgtgcagtcaagacattgtgaagaagaattgggccctttctgttgaccagtgctggctgtaggcattgcatcgcatctatttgctgaacatacttttcagatgtaatggtttcaccgggattcagaaagctgtagtggttcagaccggcagcagaccaccaaacagtgaccatgacctttttttggtgcaagtttggctttgggaagtgctttggaacttcttcttggtccagccactgagctggtcgtcaccagttgctgtataaaatccacttttcgtcacatgtcacaatccgatcaagaaatggttctttattgttgtgtagaataagagaagatgacacttcaaaacttgcgatttttaaaattttcactcagctcatgaggcatccacttaattgagttttttcacctttccaatttgcttcaaatcccaaacaactgtagaatggtcgacattgagttcttcggcaacttcttgtgtagttgtaagaggatcagcttccatgattggtcttagttggtcgttgtcaacttcagatggccagccactactcttctcatcttgaaggctctcatctcctttgcaaacttcttgaaacaccaccgcactgtatgttcgttagcagttcctgggccaaatgcattgttgatgttgcaggttgtctctgctgctttatgacccattttgcactcaaataagaaaatcttttgaatttgctttatttgctttttgtctgacatcatttttgtagtctaaaatagatataaacagcaagtaataagtcattagcaaaaaacaaagcaagaaatgcacattaaaataatgtataatataaccacatttatttaagaatgtaatccaatatcaaacggcaaatttcaacaatgcaaaaactgcattagcaccaactaatactagctaagtggccttggtaagttattgaaaggaggaaaataatgatagtttacggtatgtgttaccataccctcagcacccccacaccttaacaaaaataagcaacaaaataacctatccatgataaaacaatagtattatactttgcggttagcctgggcacccataattccagcttattcagttcatttcacagttacttcatcagtgcaccacttgccattagtagacctgtatttttctgttctgatgccattggatgggcttttgttagggcttacctggaaggttttagttattttcaacatctggaggaagaggtcgggggtttcttttccatccttcccagaagacccttatgctgattataaattctttgtattgatctgtttcacacatgcacattcacgcaccctccactcgtgctctctctctctctctctcacatacatacacgcgtgcaaacaaaatgagttttattttacaggacttctaaacaataataatggtgatagtgatgaagatagctaacatttttgaggatttatgtatgcctaacatgataaacaatttatatatattatctcatttttttcctcactttcatgagattagcattattatcctgtttttacagattaggaaattggggcatagagaggtgaaataatttgtccaaggtcaatcaactagttagtgaagaagtcagcattcagacctaggtctttctgacccaagaaccagggcttttggccaggaagcaattctgtgctgtaagtatgtatttctgtgaattatgttttgttgacataaatcatgggcttcttgaatcacagtattcttgtattttctgtttgttcctcatatctatattatttagaccataacttcttaaagactcagacatattcttattaaacttctttgtaggaatcagcaaagcattgggcacgcaaattttttatttgaaataatttacagtattgtaaaacagattttatgggagaaatttgtgatatttgaaggcttttcccccttaaaatcctcatggtttgtattacagtgattactgacagaatactttctgtctagctttactgtttttgccctccttggcatccattctagaatggttgctcactacaagaaaagttttaacgaaatgactgtatgatttaaatattctcaatgtattagaaatcacataattcaatgtgacattatacagcagcccctgcagaaaaaagttattcccgaggtcattcttaaattcaaaaattatatttcaatttataacatagaaaaggacatatgtataccagaccagtaattttatttagaaatattgtgctggctttaatctgtggagtccattaatattctgcatttctccttatgattttgagacaatgctaaattatttttaaagatagggttttgttttaaatatcttagccatctttcatgctgtcttgaggtcaaatgagatagtgtttgtaaaagttctttaagaaaaaactgaaagctgtatgaattaaagttaagattgtgtaaagttaagctaacatttttctagtaaagaggtgcctgttgtcaaagggctctgtgagcattttctgtataatttgtcaaagatatataataaaccacttttgatgctattatttttttaaattataggattattttcagaatcttctacaattagaatacatgtgattttgattaaacaaagtttctgcttactatgaaaaaaatgtactcccccacttcaacccttcaaatccctaaaactagcacgaaggctttcctgacgctaagagatttaaaaatcattttgaaaaagttaagtttcttgaaagcctctgacagagtttatggtaatcgtataacattctcatttccataaaggagcaaccttagtaggtcctaaagtgttggtgcctatgggccacacagactttccccacgttgtggaaattatccatgacacaaagattcatatgaaaatataaaattagggaggaagaatccaaatggtaatttttacagatgttgattttctgtagtgggaatctagaggcaattgtcttgtcatttaatatttgtggaattgttcttaccctttgtgaaggccaaattcatgtgtgaagcatcaatgaactttgaaagaaaggtttattctcaacctgagaaggttagagatttctgtttgaggaaattatgtggaaaacactttttgaaaggaacatatattttacttgaaataaaatgaagtgtgaaaaaagttttttactgagagaaccccattgttgagccatctaagtgaagctcaagacccatttagagatcttttaaaaattttgttccttttgccataatgaaatatttcccccatgctctgtcagagtcagtttgatttgctgtgttttttctaattttaggagcaatttctacttagttgacactttcatttttttgtcttaaatttgacataatcttaggaaacttctaaaataactagatggcagaattattaactcttagtagtttttaaatatcaaggtcatataaagtcatactgttggtttgtgccatttaaaatcaatattggattttaacagataccctctctatacttatctgccttataaattatataaaacttagctttgcatttgaatgtggtttaactgggaagtgtttaagaatgcaaatataacattattttgagtgtttacttcatataagtaatttcatgagtgtgttagaaccaagtctccatttacctatttgcatcatatgatgatgacagaggatcaaattttacttcctctttacattcaggagttttaaattttgagggaaggacgcataaatagttcttacagtagtcggggctctgccattttctcaagctgtagaaaaatcagtacatagaatcacaactgacctttattaagcagcagagaaacttcatgttgtctctggatgtttcagtcattaaaatcaagaatttggttcctaataatgggagttaactgccaaattgcatgcggtaatccatacacggttagtaaatttttttaaaacaccacaatgtagatagtatcaaactaccagcatttttgaggttggtgaaatcaaagaggaaaacaaggtaccaaccccctttagtttttatagtcttctggaataaaaacaattcagttgtcgagggtttataaagtaacttcatatttgtcagtttttcctgcctgcagtatttgaaaactggcatctgagacattagaagtttattttgtcaaggttatggatcatgacccatgacacagccctaggaggtcctgagagcatgtgcccaaggttgttgggttacagcttgggttatgttttaggaaacataaaacatcaacaatacatgtgaggcatacattggttcagtccagaaaagccagaaaacttggaaggggtgggaagcttacaaggtcattggtggattcaaatattttctgattggcagtttgttgagttattatctaaaggcttagaatcatagaaagaagtggctgggttaagataagggattgtggagaccaaggttatttcttacatagatgaagtctcatgggtggctgcctcaccagaaacagtagaaggcaaatgttttctatacagatccttaaaaggctctagactcagtctcttcgggatcagaaaaagacctggatcgggaaaggttctctattctctataggaagtaagtttcccctatgagacagttttgcggggccatttcaaaatatgtcaaagaaatacattttggtggaaaatactttggtttctttcagggccctactctctgccatgtgctgttatactagagtcaggttggaagctatagagtctgttctgttagtcttagaatctctgttttaatgttaatgctggtcagccccgtgcctgaactcccaaggaaggagagtataatgaggcatgcctgacccacctcccttccagtcatggtctgaactagtttttcaggtttagttgggtcctcttggccaggaggagggtacattcagctagttggtggggcacctagaattttatttttggtttacacccaaatacttcaaaaagtaaatcttaaagagagaagaaaggtcagtgatttttcaggtgggttcttctgtctgggaaggtgcttagcttttaccaagatagtaaaaggattgggaagattgtacactgagtagtgaagaaagaagatatttagatagctagtcatattaactaatgcaaccaatgaagagatgtaacttaacaagatattatgtcaaaaagacagggagattgttaaaaatcaatacaaaaagtttaggaagttcatttaaggggggaaaagccagaagatttgactgctgcttcataataggatgctgaaatgggtagtaaacataaataaaggtactccatgctattaatcatcagaaaaatgcaaatgtaaacctcagtgagataacaccatatacccatcagaatggctttaaaaaaaaaaacaccaccaccaagtgttggtgaggacgtggagcaacaagtaatctcatacattgctgatgtaagttataaattgtgcacacacttggaaaaaaatttttcaatatctactaaagctgagcctagaggtcccctctgctcagatgcatattgaaaatttgaagctctcacaagtattgatgtcataggtccattcattttaattaagctgtttagattatggggactagaggccaacctatattcccttgagaaatgggaaaattcccagcaaccaagaaaatttagaatacgctacctgcaaggcaagttggaattgtatacttaactcaagtgcttttattgttaacaaaactccaatcacctgccctcagctacaattaatatatctgtttcatcctattatttcttttctcttttttgtaattcctgtttattcataacttttgctctcctatcctattcttagtttctgtttccttggtttgtcatttttctgtcttttgatttcaacccctaactgccttaatctcttagtatgtcccaaagtaaaagaaaaaagtctaattgccatttcacagcacattactatgaatttgttaattatttgtttttaaagaaagtttaaaggaaggggtaggattggcagttatacaagtataatgttctgaaaatgcattttatgattttgcatagagtttaccagattttcaagtttttataatgtttactatgtgtttgccactaacaatttaggttactgttactagattttcagcttatttctctatccttttttcgtctgtaatttgtaaactatttagataacaagttataaaaaaaggttaatctagagttaaataactgttccatataattcttacagaagatattaaagaaaatgagattacatactgcaaaagttatttctgtacaatgccctaatgtggtatttaaatttttatttaatgaagagggaagatttctgacagtcactgggacacatgggattctgcttttttctatatttaatatggaaaagtaatggtgggagacatggcttatacatattgacagcaatataaactgttttccaattttgcttgctgagtattaggacattagctgggagaaaatgtttcctaaagtcaacacagaactgcactttttcatcaaatctttttaatcacttaaaagtattgtacttatattatcgttattgcttggtacatattctcagcttgtctgatactgagaatgaaaaacaacattggggtaggaataataaaaataggtagcaaagtaaattagtatcccgcaggttaaaatattaccgtaactgaaaacagttctatcatttttcagtcacacaggaagtccatgtacttcataggcaaataatgattaagataggaatgcttatattgctgttcagttcttagccccttgttctttttagtagtactcctctgatatatagagggatagaaggaataattcagcactttaatgtgttatttaattctcacagaagccccattttacataaaaatgaaattgaatggattatgagaatattgattattgattggtaagtagtaacattattttttcaagaacagcaacctaaaatactcatacagttagctctaacaatgtttacaagtcttaaaactattcctgcaaattgttgtattacataaatgttattgactcctcaaccatggttttttaaagtaatatttgttaattataaagtaagaaaatacaagccgggcatgatggcacatgcctgtagtcccatctactggggaggctgagtcaggaggattgtttgagcctggagtttgaggctacagtgagctatgatcacattattgcacgttagcctgggtaacacaatgagaccctgtctctttaacaaaaaaaaaaaggaggccgggtgtggtggctcacacctgttatcccagcactctgggaggctgaggtgggtggatcacgaggtcaggagatcgagaccatcctggcgaacatggtgaaaccctgtctctactaaaagtacaaaaaaaagattagctgggcgtggtggtgggcacctgtagtcccagctactcgggaggctgaggcgggagaatggcatgaacctgggaggcagagcttgcagtgagccaagatcgcgccactgcactctaccctgggcaacagagcgaaactccgtctcaaaaaaataaaaaataaataaataaataaataaataaataaattttttttaaaaaaggaagaaaatatagaaactaccttcagtcttataacccagacaacggtatatttttctcttctgtgtaccttttccttcaaaaacattatggatggagataggatttggggaagatggcagagcaggaagcacccagaatctgtctccccacctagacaacaattaccctagccagatatgtctgatataactgttttgaaactctggagtctgctaaaggcttgcaagttccagggaaggcttgagtggtaaattgctgttaatttcggttaatttcagctcttaacacagtagtagcttcctgtacctccacccatcccagccccgtggcaggcagctgtgcatgtgttcctagagcaatccatacacttgtgggagccagagtgagcacaaaagattctgtcctctaaatactagggatctatgctctgactgcaagttatggcttcttatcacagaggtgcagaaaaagaggtgggtgaccattattgttgcaggtccctccccctctggctgtagtgatttctaggagacttgaagggccaatgccctctttctccttaacttttctccttttccttttgggagcgagacattaaagactaggacattcataaacaactgcatatacacaaaaaattagaaagtgatgattgtgcatgctcagggaaaggtgcagggctagaaaaaatccgaagaagaccttacctttccacctcaggctggatccttggcacagaaatagcctacgacagtaaaaaataacaataacaaataacaaaccctgaggaaaaaaaagaacctgatttccagagttaccacactagtaaattcaaagttccagttttcaacaaaaaaacacaaggcatagaagaaaacaggaaaatgtggctttttcaagggaaaaatgtagatcaacaggaactgtccctgaaaaagacttgatggctgatctactagacaaaagactttaaagcagctaccttaatgatactcaaataactaaaggaagatgtggggaaagttaagaaaaagataaatgaacaaaatagaaatatcaatgaagaaatagaaaacctgaaaagaaatcaaaaagaaattatggagctagaaactctagtaactgaaatgaaaaattcactagaggtattcaaaggcagatttgcacaaacagaacaatcagtgaacttaaatataggacaacggatatgatttagtttgaagaacaaaaagaaaagattgaagtgaacagagcctaagagaactatgggacacatctgacagacctccctatacattttgagagtgccaggagaaaagagaaaggagcagaaagaatattcaaagagataatggccgaaaacttcccaaatttgatgaaagacatgaatataaacatgtgagaagtttaatgaactccaaataagataaaatcaatgagattcacagataaaatcaactttcaaaagacatacagagtatcctgaaagcaatcagaagcagctcatcatataaaaggaatcctcaatataattaacagatttcttgtcagaaactttagaagccagaaggtatgggccaatgtattcaaagtgctaaaaggaaagaactgtcaaccaagatgcctatatttgtggagccaggcatggtggcattgcacctgtaatctcagctactcaggaggtagaggcaggtggatcatttaacaccaggagtttgagaccagctttagcaacatcgcaagacctcatctcagtaaaaacccaatcctatgtctgacaaaagtgtccttcaaaggagaaggagatagcaggtgtggtggtgtgtgcctgtagtcctagctacttggaaggctgaggcaggagagtcacttgagcccaggagtttaagtttagcctggcaaaatagcaagtccttgtctcttaaagaaagaaaaaattagtttttcagcagtaaaatgagggaataaagtgagggagaaatttaaacacgcccaaataaacaaaagctaagggaattagctttgctatttgccactagacctgcactgcaagaaatgcttaagggagtcctctgaagtgaaatgtaagcatactggacaatacctctgagctgtatgaagaaataaaaatcttagtaaaagtgcatgagcaagtataaaaattagaattattgtaataacagtttgtaattctgctttttgttttctacatgatttaagaaaatgatacatgtttaagaacacaattagtctaaaagctaatagtattgtaactggtttgtaattgcagattttgttttcagtagactaatggatttaaaagaatatttgcttatttttttagtcacacagaatataaagatgtaattttgtgacatcaacaactgaaaggggtgaagacagagcttcaaaggagtagagtttttgtatgttactgaagttaagctagtttaagttcacattacagtgttataatttcaggatgttaaatatcatcccgatgataaccacaaaaaaaataggtatagaaatacacaaaaggaaatacgaaaaaaattcaaatatttcactatgaaaaatcaactaggctgggtgcagtggctcatgcctgtaatcccagcactttaggaggccgaggcgggcagatcacgaggtcaagagatcaagaccaccctggccaacatggtgaaacccagtctctactaaaaatacaaaaattggctgggcatggtcacgtgggcctgtagtcccagctacttgggaggctgagataggagaatctcttgaacccaggaggtggaggttgcagtgagccgagattgcaccactgcactcagcctggtgacagaatgagactctgtctcaaaaaaaaaaaaaaaaaagaaaagaaaagcaaaatcaactaaacagtgataaactagacagtgatgcaggaaatgagggacaaaaatactaataaggcacatagaaaatagcaaaaataagtaagttcttccttatcagtaattactttaaatgtaaatggatccaactcttcaattgaaagactgacagaatgaattaaaaatacatgatcaggccaggcgcagtggctcacatttgtaattccagcactttgggaggctgaggtgggtggatcacaaggtcaggagttcaagaccagcctggccaagatggtaaaacttcatctctactaaaactataaaaattagctgagcgcagtggcgggtgcctgtaatcccagctactcgggaggctgaggcaggagacttgcttgaacctgggcggcaggggttgcagtgagccaagatcacgccactgcactcctgcctgggtgacagcaaaaacaaacaaaaaaaatgatcaactatatgctgtctatatgacacttgagatccaaagacaacaaacagattgaaagtgaaagaatggaagaaaatattcatgcaaatagcaaccaaaagagagcagggttagctatagtaatatcagagaaaatagactttaagttagagaaggttttaagagacaaataaggacattgtgtattaataaaaggttcactgcagcaagaagactataacaattataaacatatctaatgacagaccatcaaaataatatgaaacaaaaacagaattgaaaggagaaatagacagttctacaataataattcaatgccctttttcagtaatagaccagacagaattaagtaaagaaacagagaacttaacacaatataccaactaggtctaaaagacatatacagaacactgtaccaaactataatatatacatttttctcaagtacacatgggacattttctaggttagatcatgtattaggacacagattaaatcttattccattttgaaataaataccatataaagtgtcctctctgaccacagctgggtgacttgagaaattagtaacaagtaaaactggaaaatttacagaatcatggaagttaaacaactagtggatcaaagaaaaaattacaagggaaattagaaaatgcttagagttgaataaaaacataccaaaactttgaggatacagtgaaagcagtgctaagggagaaatatagccataaacacttatattagtaaacaagacctcaaatcaacaacatagctttacaaattaaaaaggaaaataatgtaaatccaaagctagcaaaaggaaggaaataataaagatgtgagctgaaatcaacaaaacgagaatagaaaaacaatagagaaaatcattggaactaaaacttgattatttaaaaagatcaagaaatttgacaaacctttagctagatggactaaggaaaaaagaacattcaaattaccaacatcaggaattaacgtagggatgttatagcagtcctaccttattcacaagggtatatgttccaagaccccaagtggatgcctgaaacaccacagatggtactgagctctatatgtatatatataaatttttttcctatgcatacatacttacgataaagtttattttagaaatttggcacagtaagagattaccaccaatgacaaataataaaatagaataattataacgtatactatagtaaaagttacatgaatgtgagcacatgtgcgtgctcactctggctctttctctcttttccgttctctccccctatttccccctccctctctcctttcaaaatgtgttactgtgctatactcacctatttttggatcagaatttccacaagtaactgaatctatgcacatgaaaccagggaaaagaggggattactgtactactgactatagaaaataaaaagaagtgtaagacattatgaaaaattttatgccctaaaatcgggtaacctagatgaaatggacaaattcctagaaacacaacactgaccaagactaaatcagaaaggctgggcacagtggctcttgcctgtaatcccagcactttgggaggcagtggcaggtggattgcttgaacccaggactttaagaccagactgggcaacataatgagaccccatgtctacaaaaaatacaaaaattagctggacgtggtggtgtgcacctgtagtcccagctgcttgagagctgagctgtgagtattgcttgagcctgggaggcagaggttgcaatgagctgagattactagacctgcactgcaagaaatgcttaagggagtcctctgaagtgaaatgtaagcatactggacaatatctctaagttgtatgaagaaataaaaatcttagtaaaagtcaatgcatgagcaattataaaaattgctctccagcctgagtgacagagtcaaattaatagtataatgagataccaccttaaacccattagggtggctattatcaaataaataacaagtgttggcaaagatgtgaagaaattggaacccttgtgccctgttgataggaatgtaaaatagtacagccagtgtgaaaaatagtatggcaattcctcaaaaaatgaaaaatggaattaacatatgatctaccacttctgggtatttacccaaaagaaatgaaagagggatcttgaagagagttgtatacccgtgttcctggtatgattcacaatcacaaaaacatggaagcaacctatgtgtacatagatggacaaatatataagcaaaatgtggtatatccattcaatggaatatcactcaacctttaaaaagaaggaaattctgccacatgctactgaagcgtgaggacactatgctaagtgaagccagtcaccaaaagataaatactgtatgattccactcatattgggtgcatagagtagtcaaattcatagagacagaaagtagaatggtgattgccagggatagggggagggaaaaatgggatgttgctgtttaatgggtatagagtttcagttttgtaagctgaaaaagttttggagattaattgtataataaagtggatatacttaccactactgaactgtactcttaatggttaagatagtttcactgtttcaaaacatgtagtgtatccttataacaaatacccacgttcttaacaatagagatgcattctgagaaatgcatagtttgtcgattttgttgtgcaaacatcatagagtgaacttatgtatagatggtatagtctattacacacttaggctatatgatagagcatattgcttctaggttacaaacctgtataacatgctattgtactgaatattgtaggcagttgtgacacaatagtaattatttgtatgtcaaaacatagaaaaggtacaataaaaatatggtattataatcctatggaaccaccatcatatatgtggtctgtcattgacaaaaacattatgcagtgcatgactgtacatactagaacaaaacacttttataccaatactgttgtgacacattttaaatattggatactaaatgaatatagaggctgatagttgagtgtaattgtatttctacctctaccaagaccttattagcaatgcatggacttgatcctaagagaaacagggagccatagatacaggtatatgatattatgtaatcaaaagccctgaattacaagtgtaagaaaagaaggttgaaaccaagcagagaatgggggcagctgttatggccctctacttctatggtaccatgttatatttgggcatttttttttactttggatggtcataagcaatgtcttactctcttcttcctctctagtatacttgtaacactcagctttttagccctgagttaggtaagtcattgcttaagacacaggaactagggtgtatgataggccctggttaatttttccagcttcatgtcactttagcattttgcctattcagatatttctgtaaaggaaagtttatcgcatgttctagtttagtagaagaaaatgccaaatgaataaccagctcccataaatgaccttcaaatgagttgctatatttgatattagtttttaaattatgatacaggaatgactaggatttgaaaaagctctcccgtggtggtttgtgggcaaatttttgcaaatgttctgattttcagcgtgatttgagaaaagtatcttgagggtaagcaaatagggtattcagtgaagttaattgtactgtacctaggttttagaccattgaaatatgataaaaatcctgtttaatactattagaaaataaatgttttaaaatttatttgattcatgattggttcagttcctggaaattattgtcagttgagccttttcttataaagttagttttctttcatatctctccatctggttcagcaagggactgtcttatttggtttctactgtatatgtacattttcagtctgagtcttggtatttaggtttagtatagagaattacacttctggactaaccatatcgttttacagataaaatgaagcccagggaaggcaataagtaatgtgtctaattgtctgttacagtgattcaaaagcacattttctcactcatgttcttgtggggtttttgctacagactataacttctctagtgggggacccataagtatttgaaagcctaaataaattttaatattaatgagcatgaaattgtcatgctaaattttacctcagataatatatttatattgacctggacaagctaaaattgttcccattgcgtattttaaattacaattttattgattaaattgctgtcttaggtattgtatctggctcctcatgtggtttgttttaaaatagtaatattgaagttaaatgtatggatgctcacaacacagtcagcttgtttgattttattacgggtttcagaattttattttcagaaaaatcctttattgtgcttatgttaacatttaatcttgtattttctcattttccataattaaaatggagagagacaatgtagtttaggtggagggagtgggagtgaggaactgtgacattaacagctaggtaatttttgacaccatgaggaagttacttaatttctctctcaatttctttgctgtgcttcttgctacagagtgttattaggaaaaagaagaaggttttcaaaaggcaagtgctattttttttttaaagccaacctttttactatgttttataccactttctttggagggtagatagactgatgaacaaactgttcagaatgataatgtacgagtttatcttccacataattaaaccaagctaccaaatttagctgcaactttaagagaggttttttggctttttttttttgttcaattcagtttttagacatttctggtattttatttaatcgataactttgaactatattatttaatttgaaatgcttttaaatgttctcaaagcatcaaagtctaaagcataaaggtatatatatattggatttagtctaaaggttactatttttttttgaccagtagtaaccttcgtatcagctttcacatcgaaaaatattactgacctcctctagtggccaaaagattgttaatttaaaaacatgttcaggctggtattgctcttaaaagaaaaaaaaaaagatatgtcctaatataacaaaggtatggtctcattactgtagtattcagaagtagtaaaccttgatctgggtaggaggtgtttcagtaagtgcttcattgacccaagatgttattttttatttatgtagaacatgcttaggaatactgcttacaaatactaacaaatttgggaagcagtttttttgcaaaaaatttgtatgagggatcttaaagcaaatatgttgaaatggaaaaatactcctatagtaactatatttgaattccagattattaattttggtagaatttatgttttcaaaataatggattggtgattagaggttgtaaatgagttcaccttcttttttcttgtggaagagtaagtggaattaagaaaaagccagtatgcctttaaagtactgtccccaaaactggtgccactgggattttgaaagcatgttacaaattttaagaacatttaacactgtatcagttatgaccactgagtaatttcttctcattttcatccttacttccttaaccctgcttcaccctcaaaaagcagacattataaatgcaaataaaaactgtgggttttcaaagtggatatcttgagaagccaaagagatgtgttaacaaatttttatcagttttttagaacagtttgataacttttcttttagaactacttttggtccctatagtactttttaaaggtactgatatctttgatgatagatacgatttttgagagaaattaaaaactaattgagagccatgtcatataaataaaatcaatttaagaatttaagctcttcctttaatataatgagtcttttctttaatttttattctaaaatcaccaaaatgatttgaaatagctctattttgtgtaataaattgctctcaatatggttatgataggaacattcaggaaatttcacacaatgacagcatcattagcacaattgtagacattaccagaatgactaatttttaaacaatgaaggtgtatttgtgtgtatatttgtatttgttaaaaactcaaaatttttatatttgtagttattgtagttactggcataatgaaccctcattattaaattgaataacaatggaagtaggattcatgagtatactatcttttcttttttcttttttttttttttttttaatgagacagagtctcactctgttgcccaggctggagtgcagtggtacaatcccagcttactgcaacctctgcctcccgggttcaagcgagtctcctgcctcagcctcccaagtagctgggacaataggcgtgcaccaccacacccagctaattttcatatttttagtagagactgggttttgccatattggccaggctggtctcaaactcctgacctcaagtaatccacctgccttggcctcccaaagtgctgggattacaggcgtgagccatcatgcctggcctgttttctttttcattggaattatttatacagtatataatgaaacttatttaaatgaaattttattagacttagaagtacaagtgtactaaactcgtagcctccacatttatctgttacccatcacttaaaatgtgttgcatcgattttgctgaaatggagtcttgttttatcatgtctttgttgtaagatgatgttacttgttttgaaatagtggaacttgaagaaatacataagggcacaagacatatagtgaagacaccgttagtaaagtgtttaatgtttatattttgttttaagatcattttaaaaaatcagtagttttgacttgctctgtttaagactcattaatactggacatgaatagggtggattcatttggatttaaacttcatactgggccagttacagtggctcctgcctgtaatcccaggactttgagaggccaaggtaggagaatcgcttgaccccaacagtttgagaccagcctagacaacgtaataagaccccgtctttaaaaaagtaaaaaataaaaataaattagtggggcatctttgctgcatgccattagtcccagcatgcagcatacttgggaggctgagatgggaggattgtctgagcctgtgagatcgaggctcctgcaagccatgactgccactgcactccagcctgggtaacagagcgataccctgtctcaaaagaaaaaacatatatattcaaactgttgagttttgaatattttcaaataaatgtccaaaatgtgtttaatattataaaatatggattataagttgtagggggtattattatatttcaaaagacattccaattttgcttagaaatgaatcacacataggtatctaagtaacttctgaaataccttatattttcatctgttacagagagattcttatttttaattgcagtctcccatatttaaatctagcaaaagaaagaaaggaaagggaaagggaaggaaaaggaaacctttaccaaaaccagtataagaaatagagtactacacttacaaagctagcattgtgtctcagaaaagaagaaactagagccattttaggtaaaggacctaacatgatacctttgctctaggattttaatacacctcattctttcataagaattttccacacaggtggccgagtgcagtggctcacgcctgtaatcccagcacttagggaggccgaggcgggcagatcatgaggtcaggagatcgagaccatcctggctaacacggtgaaactctgtctctactaaaaatacaaaaaaattagccaggcatggtagcggacgtctgtagtcccagctactcgggaggccgaggcagaagaatggcgtgaacccgggaggtggagcttgcagtgcgccaagatcgcaccgctgcactccagcctgtgtgacagagcgatcctccgtctcaaaaaaaataaaataatttttcacacagggacctgccgctgccccagctggcatgcatgcatgcacagacccctataggtacacaaatatatgaggacacctgcaggtaccctgctggtgtgcacatgagcaaggacccccactgccccacctgtgcatatgtgcagggtgagggagccaccaccaccctaccagagtgcttttgccagcagtccccatcagagtgtttttaccagcagactgggaatgccttatccctccagtacagcaggtgcttaacctctaggggccagacagtaatcctggtctcagccccccaggattagaacacatcgctaaggagtgctgaactaagccttggcccccttaaagtgtccagaaacgaaaccaatcaactaaacccaacttacaccacagtcaattccttaagagcctcaaacaatataaaaaaagaaagccctatccaaaagacagcagcttcaaagattaaaggaacaccagcccacagagttgagaaagaattagcacaagaagtctagcaactctaaaagtcagtgtctgctaacctccaaattaccacctagctccccagcaatggctctgaagcagactgaaatggctaaaatgatagctacagaattcagaatctggatggcaaggcagctccttgacaaacaagagaaggttgaaatgcagtccaaggaacacagttaaacagtccaagggttgaaagatgacatagccattttaggaaagaaccaaacagaacttctggaaatgaaaaattcaccacaggaatttcagaacacagtggaagtattaatagcagaaaagaccaagctgaagaaagaatctcatagcttgaagaccactcctttgaatcagtgcagacagacagaaataaaagagatagaattttaaataatgaacaaaacctccaaaaaatatgcctacatcaagaacttagaatgatcacaaatttacaacctaacatcaccatgatgaactagaaaaacaagaccaaccccaaagccagcaggataaatcaaataaaatgagagctgatctgaatgaaactgagacatgtaatctgtgcagaaaatcaacaaaatgaaaacttggttctttggaaaaataagattgatagacttctagctagactactaatgaaaaaaagaagatccaaataaacacacttagaaatgacaaaggtgacattaccactcatcccacagaaatacaaaaaaccctcagagattaaaaacctctgtgcacaaaaactacaaaacctagaaataggtgaattcctggaaacataaaaccttccaaggtttgaccaggaagtaaatgaaatcctgaacagaccaataacaagttcagaaatggaatcagtaattaaaaaaaaaaaaacctaccaatcagaaaaagccgtggaccacatggattcatagctctattctaccagatgtataaagaagaattggtaccaatgctactgaaattattccggaaaaaattaaggagtacatattcctccctaactcattctgaggccagcatcattcttataccaaaacctggcagagacacaacaaaaaacttcaagccaatatccctgataaactgagatgcaaaaatcctcagcaaaatattagcaaattgaatacagcagcacgtcaaaacaccaccacaatcaagtaggctttattcctggaatgtaaggttgtttcaccatatgcaaatcaataaatgtgattcatcagataaacagaactagaaatgaaaaacacatgatcatctcagtggataacaggaaaggccttagattaaacatcccttcatgataaaaaaaaaaaaaaaaaaacctcaacaaactaggcattgaaggaacatacctcaaaacaatataagccatctttgacaaactcacagccgatgtaatactgaacaggcaaaagctggaagtaccccctgtgataaccaggaaaagacaaggatgtccactctcaccactcctattgaacataatgctggaagctcttagccagaacgataagtcaagagaaggaaataaaaggcatctggattggaaaagaggaagtcagactatcttcacagataataaatattattctattcctagaaaaccccatagtctctgcccaaaggctcctagaaccaataaacaaattcagggtataatatcaatgtacaaaaatcagtaccacaagccaagcaccatggctcatgcctgtaatcccagccccttgggaagctgaagcagaaggatcacttgagaccaggagttggagactagactgggcaaaaagagtgagaccccatctctacaacaaatcaaaaaattacctgggtgtagtggcatgcacttgtagtcccagctactttggaggctgaggcaggaggaccactggagcctaggaggttgaggcttcagtgagccatgatcacaccactgcactccagcctgggtgacagcacgagaccctatctcgataaaacaaaatcagtaccatttctatacaccaataacatccaagctgagagtcagatcaggaatgcagtcccattcacagtaaccacaaaaggaattaaatacctaggaatacagctaaccaggtaagtgttaaagatctctacaatgagaattataaaacactgctgaaggaaattggagatgacacaaacaaatggaaaaacattccgtgcttatggataggaagaatcaatattgttaaaactgctgtaatgcccaaagcagtttacagattcattgccatttctatcaaactactaatgtcttttttcacagaattagaaaaaactattttaaaattcatatggtaccaataaaggtcccaaatagaacaatcctcagcaaaaagaacaaagctggaggtatcacactacctaattttaaactgtattacaatgctacagtaacaaaacagcatagtactggtacaaaaacagacacatgaccagtggaataggttagataacccagaaataaagcctcacaaccacaaccatctgttcttcgaaaaagttgacaaaaataagcaatagggaaaaggctccctatttaatacatggtgctagtataccaggctagccatatgcagaagattgaaactggatgccttcctctcaccttgtacaaaaattaactcaagatggattaaagacataaatgtaagttctaaaactataaaaacccaagtaggaaatctaggacatactggtctaggcataggccttggtgaagatttcatgaagaagtctccaaaagcaattgcaacaaaaacaaaaattgacaagtgaaacctaattatagagcttttgcaaagcaagagaaactatcaacagagtaaacagacaacatacagaaagagagaaagtatttgccaactatgcatacaacaaaggtctgatatccagaatataaggaacttaaatcaagcaaaacctaaacaaccccattaaacgatgggcaaaggacatgaacagacacttctcaaaagacatccatgctgccatcaagcatgtgaaaaagtgttcaacatcactgtttgttagataaatgtaaatcagaaccatctcaccaatcagaatgtctgttacaacaaattcagaaaataacagatgttggtgaggttgcagagaaaagggaatgcttggccgggcgtggtggctcatgcctgtaatcccagtactttgggaggccaaggcaggcggattacgacgtcagagatcgagaccatcctggctaacatggcaaaaccctgtctctactaaaaatacaaaaacaaaattagccgggtgtggtggctagcgcctgtagtcccagctattcaggaggctgaggcgagagaatggcatgaaccctggaggtggagcttgcagtgagttgagatcgcgccactgcattgcagcctgggtgacagagcaagtcttcatctcaaaaaaaaaaaagggggggggaatgtttatacactgctggtgggaacgtaaattagttcagccactgtggaatgtagtttggtgatttctcaaacaacttaaaacagaactaccatttgaccagcaatctcattactgtgtatatacccataggaatataaatcattcctccataaagaccacatgcatgtgtatgttcatcacaacatttttcacaatagcaaaaacatggaatgaacctaaatgcccatcaacagtagactggataaataaaatgtggcatatataccccatggaatactacacagccataaaaaggagtgagatcatgtcctttgcagccacatggatggaactggtggccattatccttagtaaactaatgcaggatcagaaaaacaaatactgcatgttttcatttataagtgagagcgaaataatgagaacacatgggccaaatcatggagcttatctaataatttatgtccaacattagctctaattagttcatttccaaccccataacacagagaagggatcaggtgggtgatgccaacagttcctgccatgacagagctcacatagcagggccacagaagcattgttcatccaaagtgtttcctgagctccctctgcctgctggaccacctcttcagtgtagtaagtctggaatgggtgctaattcccttcttcatgaaatggatgcagttagaggccattatcctaagtgaattaacacaggaacagaaaaccaaataccacatgttcttacttaaaagtgggaggtaaacattcagtacatatggacacaaagagggaaacaatagacactgggccctacttgagggtggaggatgggaggagggctagggacaaaaaaatacctgtcaggcactaagctcacgtcctaggtgatgaaattattttataccaaactccagcagcatgcaatttacccatgtaataaacctccacatgtattgcctgaacctaaaattaaaattgaaaaacagtaagtcttttgtttgtttgagatagtctgtctgtgtcacccagactggagtacagtggcacaatcctagctcagtgctatctcgaacttctggatgcaagggatcctcctgcctcggccttccaagtaactgagactacaggagcacaccacaatgccccactaacttttaaaaactttttttgtagagatggtgtctcgctttattgctcaggctggtcttgaactcctgggattaagcagttctcctgccttggcctccagagtgctgggattacaggtgtgagccactgcacctaatcaagaactctttttttttttgtgaactgattgctgtaattagaattccattttgctgtgattctgttatgttgaaacaagcttacatttttttctttatcaactttattggggtacaatttacatttacattcttaaaaagtacccattttaattgtacagtttcagttttgacagatgtagtctacacttcccacattttcttctacctctttgtattcagtgcccccattgtactctggcctgctcttgtttgtcatagattagttttgtcttttttaaaaatcagttttcttgaggcataatttgcataccatgaagtacatgcttttgattaccttttcattaatcattttcctggctccagaatgtttatattccttcatcactaagacattgctttgagatgtggattcatgtaagtctcggagaagagctttgattccaccttgtcttaaaattatgtgtaatttgttagccaattaagagttgagaacatattgaagtactttttatagatagaatgttttataagcaagcattattaaaaagtgtgaccattttactttggcaactggtaggtgttagaagtttgaaatttaagaggctacttgttttcatatggataaattcctagtgtctgcctgaaaatgtccatttcttttttcatgaactgttactttggttacagattcctttcctcctctcgtcatcctctttcttttttttttccattttgaccagatccatcatctgattattgatgttgggggtggggacaagtttcctcctcctttgagattgttactgttgtaccttcagagaattgtccctctttgttgctgttccttgccattgttactaccacttctaatctctactattctttttacccttgctttttttttttttttcattttttcttatatttggatgaacttatctagtttctgatagcttttcagcacttaacactgccaggaaccaaactttatggtgaccatgggctcttaactgtttcaaggtaatatagaggacggcaggctatttttgatttacttgcttgtttaagagacagggtcttcttgctctgtcacctaggcttcagtataggggtgcgtttagagcttactgcagccataaactcctcgcctcaagtgattcttctgcctcagtctctcaagtagctgggactagaggcacaagccaccacactggtccagggcaggaggtttaaagaattccaggatattttgggcaggcagggtggctcacgcctataagcccagcactttgggaagccgaggcaggtggatcacctgacgttaggagtttgaagactagcctggccaacataatgaaaccccgtctctactaaaaatacaaaaattatctggacatggtggcacacgcctgtgatcccagctaccagggaggctgaggcaggagaatcatttgaacccaggagacagaggtggcagtgagccgagattgtgccactgcactccagcctgggcaagagacagtgagactctgtctcaaaataataataataataattattattattattattattattcagtttctatttagaggttttcaaaatcccagataacctgaattttatgtactgtaggctggaggtggaagtaggggtagggatgttttttgacaaaaagaccattaatctgagaagcggaaaatccagagattactataagatcctagatggctaaaacattgaatttctgtcacttagtgtaaagtaggatttagaaacatttatggataaagataataaagatgggggattatttgataagaaacaaaatgtaattatcatacaaatgtaaagccaatctaccttgaagagataataggacacaagggaagatttttggaatgtgctttgttctttaagtttaggtaccatcagttcttttgcaactttaaatgaatttaaggttaatgaattaacagtttggttttaaaacccaatctaggttaatgacagcttgtttctttctttgtgttgattataatctttgcctcttgtaaatattttttttttttttttgagacagagtctcgctctttcacccatgtcagactgcagtggcgcaatctcagctcactgcaagctccgcctcccaggttcatgccattctcctgcctcagcctcccgagtagctgggactacaggcgcccgccactgcgccctgctaattttgtgtatttttagtagagacagggtttcaccgtgttagccaggatggtctcaatcttttgacctcatgatccgcccgccttggcctaccaaagtgctgggattacaggcgtgagccaccgcacccggccaactattttttaaaattaatgtgtgttcagagtctcctcttttctttgtaaatttgcttccattttattgcaaattgcacgttttttttgattgggtgccaccattccaggagctccgagatcctagaatattaaagttaaggtaaatgaagtgatactaactggaaaatgttttaaactagtgctaatatcatttacataaaaataaacataaaacttttatttattaattaaaccatagaagcttagtattcttatagctaaaaagaatattttccaattagaataatatcatgggtaaaccaatagctatatagaaatgtaatagattttcaggaattagaccacagaggctataaaatgtcaatggatatattttctataacacattgtatataattttgtttcctaatattaatcttgaaatgtttgtaactttaaataatttttcattgtaaccataggtttgatactaaaaataattagatattattttaccacttgtttattgagtagaattaaaattaaatacaatgtagctttttgttcctttgttttcactgttgatctctaagtattaaaaaaaaattgatgtttactaaacctacaggtttgttttcaccattcaaatgaagaaaagctgttcaatataaatacttacctagaaccataatagtacagaggagcaggattgaaatcagtcaaaccatgatagatatgatatattgtcaaaggatataatacagatgccttggtttttccacacaagcatattaattcactgtacttttttgagacttgagttttactgtgtcacccaggctggagtgagtgcagtggcgtaatctcggctcactgcaacctctgcttcccaggttcaggcgattctcctgcctcagccttctgagtagccgggattacaggtgcccgccaccatgcccggctaatttttgtatttttagtagagacagggtttcaccatattggccaggctggtctcagactccttacctcaagtgatccacccaccttggcctcccaaagttctgggattacaggcatgcctgagccaccgcgcctggcctaattcaccgtacttttaaaaagtaacagtagaaaataatcagagatccaaaatacctggttttagttacttggaagttcaaatgttttaatttctttgtctatattgttatattgcatttgtattagagaaggtaagatataaaatttatgctctgaagagtatcatccccatcagttatcttccatgggatgctgacttaacagactagcaaaattggaaacttcgtgccatgaactgtcgaggtggttacaaaaatttaaaagatacaagctgcttccagaaagatccaagtccagtagtaataacaaaacacaaactattgtgaatggtaaatgctgtaattgtgatgtgttaagaatgggtgagaatacataaaattaccattttgaccactgttaagtgtacagttctgtggtattaagtacattcacactattgttcaaccgtcaccatcatccatcttcagagcttttttatcttccccagctgaaactctgtgtccattaaataataactacccattcttcttttccctgcccctggtaacaactattctgctttctgtctatgaatttgactactttagttttcctattattaaacagtctttgtgaccactagcccagcacatagtaggtattcaataaatttctaaattaaatggcatttaggaattgaaaggcattgcttatgtcagtggattgactatatatcttatgtgcacccagactgccaattgttataataaccttgttaattcataggaaaccttttgttttctcaagtattttttatttaaattcttttcacatagtttacttttttttttagactgaatctggatatggatctgaatccagcttgcgtcgacatggctcaatggtgtccctggtgtctggagcaagtggctactctgcaacatccacctcttcattcaaggtgtgtagttaatggatgccttaagttaaacaacataaattgagtttagtattggatgttgtgaacagaacatatgtgataattttttgaacaaacttttttatagtataatttatttgaagttattagagaagtactttttaaggtataaaataataactcatatagatgaacacatgtcactgattttatttcattcattcattaatgaggtaaaatataaaaaaactggttcaaaggaaaatctgaagaatactgaaatgatttgtgaatatgggaaaaactggtcagtatccacagattaataatcagtgcttctgcaccagacaaaattcatttgcatctctatgaacaagaattatttatactactcagttttttactaaaagagttgtaaaatagctcaaatgcagtgaaaggcaaaagtgtctatatgatcaaatagtactctcccaagggtaccataaatgacagctcaccattactttgaaaggacacaagtaatattttttcccatttcaaagtctttcacagttgttccacacaattttgtttaatttgaaaataccaaatgttatatttgcaaactgtcaggtattactgctttcttgttttctataaaaaatagggcttatttataagtgatatcacgaggttatcatcattcataagtggcttatcgctatcaagccaatagattcatcagtttcaagcctattcctagaagtattatattgaactagacagctctccttatcccatgccctcagttataaggtgcagaccttaaaagttgatgaaataccataggaccacatgaaatccagttttgttttacttgaattacatccccctattttatgttttgcagaaaggccacagtttacgtgagaagttggctgaaatggaaacatttagagacatcttatgtagacaagttgacacgctacagaagtactttgatgcctgtgctgatgctgtctctaaggatgaacttcaaagggataaaggttaattaggctattaccactatttttacttggagaatgaatggattaaaagcctcttgatctcaaagggtaatgtctttaagtgataaaggtgtttatagtcattttttgctgcaaacccccagtgaaacagatttcagtgtccttgtaacttgggtacttcagttacacatactaattcattttgatcatccataccagatgccattgaagacctttattttatttatttacttttttgttgagacatggtttcattctatcgcccaggctggagtgcagtggcgcgatcatagctcactgcagcctcaaacttctggcctcaagcaattctcccatctcagccacccaggttgctaggactacaggtgtgcatcaccacacccagctaatttatttttctattttttatagagacgggggtctcactatgttggtcaggttggtcttgaactcctggcctcaagcaatcttcccacttcggcctaccaaagtgttgagattataggtgtgagccaccacaccaggcaaagactttcaaatgatactctttattccattaaaaaatgatatctattatcttggtattatggatcatttcacattattattatgtctgataaatttagcccatgatgagtcttagaggagataagtatatgttaaatccttcagatctgaaatcaaccagttgatctctttctctttctccctctcatttctctttttctccccttctcttttctttttgccttttcctctctctctctttttctttctttttttttttgagacagagtctcgctctgtcaccaggctggagtgcagtcgcgtgatctcggctcgctgcaacctccggctccctggttcaagtgattgtcctgcctcagcctcccaagtagctgggattacaggcacgtgccaccatgcccagctaatttttgtatttttagtagagacggggttttggccaggatggtcttaatctcctgacctcatgatctgcccgcctcggccttccaaagtgctgggattacaggcctgagccaccgcgctcggccccctctctctctcagtctctccctttctctaccctttttctcatagaagaagaatcagtaatagaaatggaagtaataattgtatgtacatttaaaaataattttattgagttcttatttaaaagaaacaagatatcttcaattaacttttagtgttaggtttatagtttaactttcctttgttagtcccaaaaatactgctgatgtcaacattgttcttcagctttttcacttaatttattgtgatggcaaaaattaactactctaccattattaccaaacaggactaagttcatccccaatataactaggtggcttgacatggtttcatttctcttttttattaaatgtgtttgatctggatccaagttctttttgtctattctatattccctttttctgccttctttggatgaaatttttttcatatatatataattccactttatctcctttgttagcttcttaggtataactcgtggttttgttattttagtggctactttaaggtttatagtttgcatatttaacttaccacagtctgccttcaagtaatataccactttatgtgtagtatcagaaccttccaataatgtagtagaatgttcatagctccctgtgaccttaaactcctgggctcaagtgatcctcctgcctcaacttccgaactggctaggactacaggcatacaccgtcatatctggttaatttttaaattttttgtagagatgaggtctcgctatgtggcccaggctggtctttaaactcctggcctcaagggattctcccacctcaactgcccaaagtactagaattacaggcttgagccattgtgcctggccttgaagttctatttgttaatataaaaacttttattaaaggttttggttcgttaatgtgtgattttttttttttcccctctaaaaatagaaaacacctgaacttctgtttctccttcattaaaaaagtataccttttaatcaatttaaatgttacagattagctttaaacaaaaacaggatacatatagaatatgatgccttgtttatcttaatggtccataccaatagcgtatagtattagaaggacaaaagtgatggtggaaaaagtggaagttggaatgcagtgataaccaggttgtgtagatgatttgaaaaataataatagacattacacggaatcttttctgctacatgtttaaataaatagcaaattgaagactgatgtattagtttgctagggctgccatatcaaagtaccacagactgggtggcttaaacaacagatttattttctcacagttctgagataaaggtattggcagggttggtttcttctgaaggccatgaaggaaaaacctgttccacgcctctctccttggcttataggtagcctccctatatcttcacatcatcatctttccctttgtatgtgtctgtgtccaaatttcttctgcatattgtacagtcatagtggattagtgcccatcctaatgaccccatgttaacttaattactgctttacaaaccttgtctccaaataacagccatattctaaggtactggagattaaggacttcaacatatgaatttctgagacacaattcagcccataacaactgatttccctacaaatgttatttgtgagatactgactgattgattgatcctttgatttttatttgatactgggtctccctctgtcacccaggctggagtgcagtggcacaatcttggctcactgcaacctccgccccccaggcccaagcagtcctcccacctcagccttcccaagtagttgggactacagatgtgcaccaccatgcccagctaattgttgtattttttgtagagacagggttttgccatgttgcccaggcttgtctcaaactcctgagctcaagcagtctgcttgcctctgcctcccaaagtgctgggattacaggcataagccaccacgcccagcctgaaaaagctattttgtgtctgttttggaggtggaaggttatggtaaaggggtagtttgagaggaagatttaatgtgctggtggctgagaaatatttgggtggcaaaaataaatagatgtctggctgatactgtaatcatctcggggagctttaaaaaagaaataattgtatcatacccttcaccatagtctcactaaaccagaatattcaggggttgaggggagagagagagattaacgttttgttctttaaaagttccttgataggtagataatcaaaagttccttgatatgtggataccctctctagtagaagtatgagctagcattataaacaagccttctgaaggcagaaggaaagcacagcagaaaggggaaaacaaatattgtacagaaggcttttgagttttccaagaaaacaactcctttaaattgtgagaataggtcaaatctagagcaaatgaaatatctcctgcttctgtagaaaagaatgcatgaaggtagagttgaagagtgagtaacaaactgttttaacttttcattgatatgatgcaaaaaagtagggaaatttgaaaaggccccgggaagtaaggatctcaaaaggtacttgaaggtcatctttatgggattatgccaggggactaatttaggaatagtcgtattataacttcaactgatggtcagcatgattttttatctgagtatggtttaaaaataatgtatctaaagacattgcacagcatatttattgagcatatgagatcttactcatctttgtattttcactggtaatcaagatatgctcatattgaagtctgtaggaatgatggaagtggaaaagaaaaagaattgaatattgagatcacagccaggtagaaatgaatacagggtattaatagataatagtttatgatttgtaagagttgttatagatgattgacaacattttcaagtggttataaaaaaatgaaatagtccagtaattagaaaatggcagtacagaagattttccatggtgattcctaccatttaatcaaagaagggaaataaggtatcgaattgggctctgcatccataaaaaagacagctaagatagatgagatgttccttatagagccacggtgctcctgatgtaaaaagatacatgcagtaagtaagacattagtttaaaatgtagattccttctttataaagggagttcctgaaaagataaaggagccatgtaggctgggtgcagtggcttacacctgtaatcccagcattttgagaggcagaggtgggcagattgcttgagctcaggagtttgaaaccggcctgggcaacatggcaaaacctcatctctacaaaaattagctgggctggtggtgtgcacctgtgttcccagctgctcaaggggctgagtaggattgcttgagcctgggaggtggaggttgcagtgagctgagattgtgccactgcactccaggctgggcaacagagccagaccctgtctcacaaacaagaagaagaagaagccacaaaaagcttgataaaagcagcaaataatgttgggaactaagatgcaggaatttgcattatgagtggaatgcgtagtacagagaattaaagcatgtggcgtagtagaaaaagggatagcacatagaagaaagaggtatgttaaagtagaacaagagagattctgtttttgtctggaattagagaaaagggatgcctggatacagatacagcctgggatgaatgaaaattgatatcatggtcaggagattgagaccggattcctggctaacatggtcaaaccccgtctctactaaaaatacaaaaaattagccaggcatggtggcaggcgcctgtagtcccagctactcgggaggctgaggcaggagaatggtgtgaacccgggaggtggagcttgcagtgagccgagatcgcgccactgcactccagcctgggcgacagagcaagactccgcctcaaaaaaaaaaaaaacagtcgatatcatatctgcaagtcattatattttccttgcacatcagaaatagtatatataagaactctcgcctgggtgtggtcactcacacctgtaatcccagcacattgggaggccgaggtgggcggatcatgaggccaggagtttcgaaaccagcctggccaacatagtgaaaccccttctctactaaaaatacaaaaatattagctggctgtggtggcacgcacctgtagtcccagctacttgggaggctgaggtggaagaattgcttgaacctaggaggcagaggttgcagtgagccgagaccatgccattgcactccagcctgggtgacagagtgagactccatctacaaaaaaaaaaaaaagaacaactcttagaggcaagctaaggtgtcttctgcatagaaggcacccttatagtcctgttcagcccttctggtcctcttacagagtggaaatggccccacggaagggagcaagagataggaagactacagggtgaaataattcataactcagtaaccttcccttacacaaatgagagtgaatatggtttaaaaataatgtatctaaagacattccacatatttgggtggcaaaaataaatagatggctgatactgtaatcatctcggggagctttaaaaagaaataattgtatcatacccttctccatagtctcactaaatgagaatattcaggggttgaggggagagagagagattaagattttgttctttaaaagttccttgataggtagatatttattgagcataccttgattaccagtgaaaatacaaagatgagtaagacttcatactcagaatcagaatccagagtaaaatgactcagttgaacataagaatagacattaatttctatttcttttcatcctaatttccttaaatatattttatttagtggtagaagatgatgaagatgactttcctacaacgcgttctgatggtgacttcttgcatagtaccaacggcaataaagaaaagtgtaagtaatacatttttcccctcagctggataaaatatactttcagaagttatgtaacaactcacaagaaataattacctgattaattttttaaaaagcagtagaactggtggaatccaagtgaaaatatcttccaaggcatgcaggtaaaaatcacattctgacattatgtaataatggtaacttttacataaggatgtccagctgtcccagcatcatttgctgaaaagacaatttttttcccttgtcttggcaccttcgtgaaaatctgatagactgtaaatgcgagggtttatttctggattctcagttctgttgagttgatgtacgtgcgtattcttattaagaaaatataagctttaaaaaagctttattgagatacaattgacataccatttaaagtgtataatttgataaatttggatattttcgtgaaactatcaacacaatcaagatagttaacatttatatcaccttcaaaagttttctccatcccctttgtcattcctctctcccccattcctgaatagccactgatctattttctgacactatagattagtttgcattttctataatctaatataaatggagtcatacagtatgtattctttttttgcctggcttttttcttagtttgagattcatcattattgttgcatatatcagtagttcagttcttctcatagctcagtagtattttattgtatagatataccatagtttgtgtatctagtcattcattggtggacatttgggtcggttacagttttgactattacaaataaaactgctatgagcattcatatacaattctattcatggaaatttattgtatttattttgggtaaatacctaggagtagaatgttctaatcatatggcgggtgtgggtgtgtttaatttttaaagaaactgccaaactgttttttaccagccacatatgagagtcccagttcctccatatccccaccaacacttaatatggtcagtcttcaaatttcagtcattctaataggtgtgtagggatatgtcattgtggttttaatttgcatttccatattaactagtgatattaagcaccttttcatgtttttatttgccatttatatctgctctttggtgaagtgtgtgttcacattttttactcatgttgggcttggtgattattattattattattttgagacagagtttccctcttgttacccaggctggagtgcagtgtggtgatctcagctcaccgcaacctccacctcccggtttcaagtgattgtcctgcttcagcctcctgagtagctgggattacaggcatgcgccaccacacccagctaattttgtatttttagtggagacggggtttctccatgtttgtcaggctggtctcgaactcccagcttcaggtgatccgcccgccttggcctcccaaagtgctgggattacaggcgtgagccaccgcgcccagccagtgtttattattaatgagctttgaggttacttcatatattctggatagaagtctttattaaatatatgccacacaagattttctcccagtttgtggcttatctctttatcctcttaacagtgttttcaagagcagaaattttacattttgatttaagtttcacaatttgttctttgatggattatacctttactgtcatatctctaatcgtttttaaagtcaaaattgacattatttcatttataattattctactagaatgatttcttaactatagaatattatgatttcttgtttgcatctttgagttttaagattttttgtttaattcaaaagctaaccatgaattaaaatgataaaattgaaacgtaaaaggcattgagtttaagtgcattggtcctggatttaaatttgtatgtttatttttaaattgtatattattttattagattctttagtttatcttcagattttttttaattctaggcttttcaaaataataaggtagttcttgccataattaggtcctactctaagctgtcagaatgttattgttaaagtattgctcctcctaccatttgattaattgggtgcagcacagcaaataaatttcaggaaacagaatctagaaaaaaaggacttgaaagtacatatgctgccacgaagcttctttgcttatagagcttggataggagatttttaaatgttggcctacaggaggaaaattaaaatcccaaaacctgctctgacttgctaattttctaaacattttctaatcttaaattgtgatgaattatttcctcattagagatattttcagtgaataattttcattttcagtatttccacatgtgacaccaaaaggaattaatggtatagactttaaaggggaagcgataacttttaaagcaactactgctggaatccttgcaacactttctcattgtattgaactaatggttaaacgtgaggacagctggcagaagagactggataaggtaagactaggtttttttccttttaaaaataatcacatttaagttttacgtattgtttgaatatttaaaacaagctaacttcttagggaagaatcttgggttgatagaaatagcagatgatactactactctgaagctttatgggcatcctaaactcatttgcctaacaagattcaccaattacttgtttagttactatacagtatgctttcttgaaagatttaatataaaagtttttgtgatgatgttagtaatgctttggaatagaagtgttgagccatttaacattacacacctttaggtgcatgatgtatgaaactgcatttaaggcatatgaactaacttatatgccaatttacaaagttaaacatttacttattatagtaatactcatgtattttttccatggtcagtgataccatttaacatacattatgttgtttgagcatttgccctatgttcacattttcccacctttgtttaaactgcagcactgataatattatagtatgactctttagtttctagtgtgaagcatggctcagtggatttgttaagtaggaaaacttctatttataattcagctttagaataatagtaaaatgttagagttgaaacataccttaaagttctagtccaatgccatcattttatagaagaaggaattgaggcccagaggcttgtcaaaaggtgaaaagtaatagagttagaggcatttttctctattcttttatatatcagctctggatgccagattagacatcagccagaatcatattcattctgagttatattgcttgcagagtttgaaggcctttgaatttgagcgggacactaaggaaagcaatgatagcactatgtgtttaggaaggttcccatgttttagaagaaaagagagctgttcagaatgcacaagtgcaggtgagagtaagccattttgattaggaatatgtcttcttttaaaataggtaatgaaaacatccttttaaggtatagaaaatttattatcattctggagccaaactattattatcttcaaagatttcaactctatactcagtgtggatcaaattgaattattagaagagtccctgttcacaaaaaaaaaacaatgtattgaaaaacaggacaactccctaaatacattagactaatggttcaagattatcattcagctagtccagactagcttatttccaactttttggcaactttctctctctttagtctctttttccttcactaagggatcatattctttggtcatatactctaaccacattgcctaaaataattttttttaaacctttgcacattatataccacttcctgattattttagcattcaagtttatttgccatgttgaaaaggggagatagatttttgattgctttcagcattgttaatcttaccagttctctttctttattgggtagcaatgagcagagcaaaccaaagatctgcgggaaaaaaaccacttttgttgcttctccatgcaacactctccaccaaagaacagccagaaaagatggcaggcagtattggttaaaatctggacactactgtgttttatagtcttcttacagatctatctgatgtcaaattttattaaccttttccactgtaattttttctcaaggttgaaataactggatcccagttacattttacatggaatgtaagtgtgtgtgtatttgcacatgtgtgtacacacagtatgtgtgtgttcatatatatatacataatatatgcagggtatgtgtgtatttattggtaagcaactctattcaagaactttctaatcttttgtatgtagagtgtgtgtgtgtgtgtgtgtgtatatatacacactaaagactagaaagttcttaaatagagaaagttgtttatcaacaaatacgtctttcaggtaattcttagaattgagaaagaaagtacaatgataacaatatggtttcactgaaattgtttcattcaggtgtgtgcctgctgtgtgcttgactctaagctaggaatgggaaaacagtgatgagcaggaaatagtctctcaaggggcttaaaatctaatgagagcaattaaataggtgataataacagctatttaataatagaattgtctatattatacttttatgtagatttataatgtcagttccaggattctttcagctaattgaaaatactattttgtagtgatgatttttattggttacctataataataatgatcctttccactgtagaagaagtgtacttaattgttagccagtcatgtccaggaaaaccaaaaattctaaaattaggcaattatggttaacagtgttaataagagataacctgttcattgaagatacattttcttacattattagattcacaggtgtgtacttttacatacattttcactttcctgtaagtctttaatattattgctgtgctgtgcatttttgttttattcatttaaaattaatacataacatacatacaatgaagtgtaccaatcttaagtatactacctgattttttttaacgtttgtatacaccccttaaccatagacagatcaagatatataacttttctagcaccctagaaggttccttcatgctccttcctattccatatcataccaccaccccaagaggtgatcatatggttttaacctatgtcattatagattagttttgcctgttctggaacaacatacaaatggaatcatacagtatacttttgagtcaggccttctctttccttcaacatttgactgtgagattcattcatgttgttatatttaatagtagtttattcttttttattgctatacactattttattgtataactttttattgtatgacttcaatttgcttatctattttcctgttggtggacatttagatttttttcattttttggctatcatgaatgaaactgctatgagagttcttggggcatatctttaggtatatttctcataccttggagtagacttcttgattcataggggtatatgcttaactttagtggatactgatgattttccaaagtgattatttctaccagcaatgggtgaggattccaattatttttaattcttgacagcattttggtattgttagggatgtgtgggtgtgtgggtgttgttgatgttgttcactcttgactgtacttggtattgtgtgtgtgtgcgtctgtgtgtgtgtgtgtgtataggtgttggtgttgtttgattttggggacagtctttctttttttgagagacagggtctcactgtgttgtccaggctgaagtgcaatgactattcacagacacagccattagtatactacagccttgaactccagggctcgggtgatcctcctgcctcagcctcctgaatgaccaggactacaggcacatgccactgcacctggcttagtcattctggtggatctgtagtcccattttctctttagtacacaaaaatcaattaatgaaatctttgggtctaatgaacccattgattcattgatttccactgtctttaacgctgatgtggtatttagaagtagtttgctttgtgtgagttcagtttagactttagccattaagttcagtgatacactgcataacgacatttccgtcagtgatggaccacatatacaactgtggtcccataacatgataatggagctgaataattccttttgcctagtgacatcttgatgatcctgaccctgtgtaggcctaggctaatgtgtgtgttgtctcttagtttataacaaaaaagtttaaaaagttaaaaaaaataaattttttaaaaaatagaaaaatgtttgtagaatacagtataaagaaaatatttttgtgctgctgtacaatgtttatgttttaagatatcttattacaaaagactcaaaaagtttaaaaaattaaaaagtttataaagtaaaagttacagtaagctaaggttgttattgaaggaagaacatttttaaataaatgtagtgtagcctaagtatgcagtgttaaaagtttacagtggtgtgcagtaatgtcctacgccttcacattcattgactactcactcactcactcaccctgaggaacttcaaatcctgcaagctccattcataagtgccctgtgcaagtatactgttttttatcttttatatcatatttttcctgtcccttttctatgtttagattcacaaatacttaaccatcatgttaaaattgccttcagtattcagtgcagtcatatgttgtaaatgtttatagcctagatgtgtagtaggctataccatctaggtttatataagtacactctatgatgtttatacaagaattaagtcgtcagtgacacatttctcagactgtatccccatggtgaactaacatgtgacagtaaatacatgtggctttcactagccttctttagatcacaagcataatctgttctcttatgatttttgatgatcacgctcttcagagtagtgtttttttgggaataaggggaaataggaagagctgtttacatttcctgtagccagagtgaccatgaatcctggtttgaccaaggcagttcttaattcagcaagattattactaacattccctttcgctttcaaaagtgtggtgcttacattacccaatagggggaccaagcaaatcagtcttttagaaaatggaatttggacaaggtaaaaaaaagaaagaaaagaaaaaagccatgtatgactatttgaaatgaggaaataaaagcattagattatttacaaacatactggactccagtatcagttttgacccagtgaaccccattgttgtggaaataagttttatatgggaccaacctttgttattttaagtgttgaccctgggtcttttaaccttttagagctataggccctatcattaaaaggagagtgttaaaatacataactaaagtctttttcaacgctaaaatacagtcttaagcagcagtgagaaagtataagaaggttttctttcttagaatatctttttagcattcattgatcccacctactgagttcttttctggtattacttgctgtttttcttcataccaaaataaatgtatctcttaactggggttggtgggaaggggaagtataagaatgtatagtaggtatttttcaggtgctaatttacctgggtttttttcttttcttttctttttaagtatacatgcagttacttaaccatttaaacacataacctacttttaaggtgattttagtggtgatttaaatcgtaggttgtggccgggtgcagtggctcacacctgtaatcccagcactttgggaggctgaggagggtggatcacgaggtgaggagttcgagaaaagcctgacaaacatagtgaaaccccatctctactaaaaataccaaaattagctgggtgtgatggcacaagcctgtaatcccagctacttgggaggctgaggcaggagaattgcttgaacccaggaggcggaggttgcagtgagccgagaccatgccattgcactccagcctgggtgacagagcaagactccgtctcaaaaaatacatacatacatacatacataaatagtaggttgtaagtaatttatagcctagagaaaagtgttttcttgggcagaataatactcttatttttcacaggagtggaatttttttgtgtcaaattgtaaaatttcagtgaaatgtagaggaattccacctaaaagacttcattgtaattaaaatgcctgcctcaaattacagatttttcacttctttttaataggaaactgagaagaaaagaagaacagaggaagcatataaaaatgcaatgacagaacttaagaaaaaatcccactttggaggaccagattatgaagtatgaatttatattttgatcttagagaaacacatagatcatgtctatcacaaaagtgattttttaataatactcttgtaacctttaaatattctaaatatataattttttcctcagtgtttatgttaattcagtgtatatttcatgatatataaatgccaggcatgctcaaatatatatttcttattgcctacaaagtttaggcttcaaaaggcttagtattaggcctgttcacttgataggacaaatttttatctcccctgtaaagatgatcatttttaatgttatctactttttttttttttttaacataaaagcaaactataaaggaaaaatctgagtactttgcagacaaaaagattttagtctgtactatactgtgagatcttttttttttttttgagaccgagtctcgctgtgtcacccaggctggagtgcagtggcgcgatctcggctcactgcaagctccgcctcccgggttcacgccattctcctgcctcagctgccctagtagctgggactacaggcacccgccaccacgcctggctaatttttttgtatttttagtagagacggggtttcaccatgttagccaggatggtctcgatctcctgacctcgtgatccgcccgcctcagcctcccaaagtgctggcattacaggcgtgagccaccccgcccggcctactgtgagatcttatccatagctgaacataaaactgttctaattgtctttgtttgaaaatgtctgaaaccagcttttttctccttgtgtttatttgttaagcaggtaataaaatctccttcacatgtatatacacacatacattaaaatcttataagctttctatattaagagaaaaaaatgtgtaagaaatatatttggtaattgccattaaacaatgttgaggctagcgcactggctcacatctgtaatcccagcactttgagaggccaaggcaggaggattgcttgaggccaggagttcaagaccaacctggacagcatagcaagacttcatctctataaaataaaataacaaaaattatctgggtatagtggcacatgcctgtagtcccagctactgaggagcccaagactgcagtgagctacgattgcaccactccactccaggctgggtgacagagcgagactttgtctctttaaaaaaaaaaaaaaaacgtgttggccagcacggtggttcacacctgtaatctcagcactttgggaggctgaggcggggggatcacaaggtcaagagctcgagaccagcctggccaatatggtgaaaccccgtctctactaaaaaaatgcaaaaattagccgggcgtggttgtgagtgcctgttgtcccagctactcgggaggctgaggcaggagaatcacttgaacccgggaggcagaggttgcagtgagctgagatcgtgccactgcgctccagcctgggcaacagagcgagactccgtctcaaaaaaaaaagtgttgatatttctgaaatgagcagtttaaaaatggggtatcaaggagtaccactgaggtggaacagaagaataaaatagttgtagttatatttatgaaaacagaagaattttttcttgctacttttgctctagaaaggaaaactaaacagctgctctgctgttgctgaatttttttgcattggaatcaatttccaactgtgagagtgcattctgatgagacttaaattgtaatatttttaaattattctcaatttatcccttctaaaatgtattaaaattacataattagctatcctctgaggttttaatatgaggtattataatgatgatttttgttttgaaactaaacaaattattttgctattttagaattattattttggaagaaataccaactttttaaagtaccttattttttaatattataaataaaatgtatattcattataggaagattgtacaaaaattcaaataagccaataaagcccatgttttaaatttaacaatatatggtacagtttatcatctaccagcagtatgtaagtataatttgtgtacatatttatctctgcttccatcaacacaggttttgttttttttttcctaggggtagaggacaggggtggagggaagaggggccttgtgctaggtacatgcatttactagtttcaaagccaaaaaattgctttatgtatgtaattgagcattttaaaaattatgtttatcagatattcatgtttcttttttttttattttattttacattggaagtacacatgcatgtttgttacatgagtatattgtgtactggcagagattgggcttctagtgtgccccttacccaaatagtgaacattataccaaatagctaattttttaactctcacccctccctcccaaccttcctccttttagagtccctacatttccatctttatgtctgtgtgtacctattatttagctcccactcataaatgagaacatgcagtatttgactttctgtttgtgagttaatttgttctgggaccaaactgaggttcgggctgctatttctcacggcccaataacgagatgcagatgaactggggaggaagagagttatttctgtaactggttacagggagaaggtctgaacatcatcaccagaccaactccaaattacaaagttttccagagcttatataccttctaagctatatgtctacctgtaagtgtgcattcacctaaagacataagttactaacttcttttaatctataactaaggtctgagtcctgaagaccttcctttggagcctcagtaaagtgctagagtgattacccttatcgtgtctcctactatatcacataggtttgaggagttccttcagacccctaatacacttgtttgtggaggactggggagtttcttcagacccccagtaaaacttgtttaatcctaaatggctcctattaagaattccttcattattgaagaaacaaggagttgttcaatgggaacagagtttcagttttgtaagatgaaaaagttctagagatcttttacattgcaatgtgcatatacagtaattaacactattgtactatacacttaaaaattgttaagatggtcaattttatgttttttttttttaccataataaaaaaaaaacaattgtgccaaaaaaaaaaaaaaaagaattccttcattattttatcacgctttaaggcccaggaaaggcctaggcaaaactcttgatgggcttttgttacatcccagcctttgtataagggcactggcttttaatatttaacttaaacattcagtcagtactgaaatggttgtttagtgagacctggcctgtgacaagttcactttggataatggcctccagctccatccatgttgctgcaaagaatatgatttcattcttttttatggctgccacgtttcttttttacgattaacttggccatgtcctttggttgttttcttattcgttttttttgtttgtttgtttgtttgggttttttttccctattgatttagaagatgtatagaatttgcctttttttttttttaatttttttccttcgtaccttaaaaaagtttggtagattttgacatataaaagttttaaaccttcgtgtaattaactcctcagtcctttgatccacttttctccacatttggtatcatgcttagaagggcattttctattttaaataatcatattttctaattttttattttccaatggtctcttctaaatatattaatacatctggagtttttaaaataatgatacaatatagaaacctattttattccactagcatttgttgaataaacatcctttattcacctatttgaaatgcactttactctttcttagtgaagaaactggttaagggtactctaattattttttttctcactaagttaaattaaatatacaattctttagataaactgggaactgtttttacacttccccttcttttggagttttgaaccatctatcttttcttgtaacaatattatagtcgtatgggttttagacacttaattcaaactatgactctttttggttataatcagacattcatgatgttctaattataaaaaagttctaagtgtttctgacttctgtagcctcagaaattactttataatcttaaatttattccttaagacttaccataatgtggctgggtgtggtggctcacatctgtaataccaacactttgggaggccgaggcgggcagatcacctgaggtcaggagttcaagagcagcctggccaacatggtgaaacgccctctctactaaaaatacaaaaattagctgtattaggcatggtggtgtgcacctgtagtcccatctactcgggagtctgaggcaggagaattgcttgaaccggcaggcggaagctgcagtgagccaagacctcgctactgcactccagcctgggcaaccaactgagactccatctcaaaaaaaaaaaaaaaagacttaccataatgtagggcactacactaggcttggagaatacaacaagaaacaaggcttataaggatcctgcctaagggccctacctgaatgcataatgggaacaaaggctaatagacagttatcataatgtatgtcatgaaacacttttaatgcagggaaggtgttgaatcagagatgtcttcccggagggaaagaacctcttaggaggaaagaacctcttagcagaaaccttaagaatgagtaaattgagtaaagagtgttttccagtagtcagaagcaaaataatatttttcctcaggggaactgaaagtaattctctttggaaggtagagcctccacaaattgagaggaaagaatggttaagagactgactggaaagatcaacaagaattagttcagatcctgagacaataggttttaatcaagaaaatgacattttcacatttgcagttcagaaaagtcattctccctgcagtaggaagaatggattgaaagtaacaattgtgactgggcacttggacactttttgtataatatagatgagagttgaaggtggcctaaattagagtcaaagcaggaggaatagagaggcactgacaaattagatacagtaatcccattgtatcagtggttgggggggatacattacaagaccccccccccccccagtaactgcagatagtactgaaccctatatacactgttttttcctatatgtgctatgttttttcctatatgtatgtacctgtgataaagtttaatttttattttaacaataataaaatagaacaattatagtactgtattatagtaaaaagttatatgaatgtagtctctttctctctcaaaatatcttattgtatataaaccacataaatcaaaaccacagatgggggagactattgtatttggaaagtagaattgaagggtgtgatgattgaatgagggaaaaggaaggaatccaagattaggcccaggtttctgcagatacgtgtggagatagaagaggaggtttcagacacgttgcaattgaggtgagtcatatgaggaagtcttctatattagatacaaagatctgacccttagaagagagatggtctggctgtgaatttaggagtcatcaaaggatgactgaagcgttggatataagtaagaatgctgtgggtagagcaagtatggaaccctgaggaacaccaacatttaaaggataggcagagaaggggaaacctacaaaggagccccataagagtgcttagagagggagaggggaatttaggaatctaagggtagagaactcttcaaggagagttgttaacataagaaatgctattctaagggggcagataagtagctcctgcccttagtaagcatgatgagataaaagggttttttttaaagtcccttttaataaagaaaattttatgccaattcctttagttcctctcccaaaggtttaccattaaaggaaaaaccatttcatttggcaaaatagaatttttgttgttgttgttgttgttgttgtttgagactgagtcttgctctaccacccaggctggagtgcagtggtgcgatcttggctcactgcaacctctgcaacttccgcctcccaggttcaagcaattattgtgcctcctcctcctgagtactaggtttatagacgtgctccaccacacccactgatttttgtatttttgatagagacaggttttcgtcatgttggcctggctagtccagagctcctggcctcatgtgatctcccctccttggtctcccagagtgctgggtttataggcatgagccaccatacttggccagaatttttaaatgctgtagttttcaattagactcctgaggctctgacatgattgcttaaggactagaaatccacatgtactaaatcactgtagattgaatgaatattaatattttttaaatgtagatgtggttaaatagtatttaaaatcattagaaaatatgcttgagtttggatattttgtgttttctctgatcaacagagagcaaagttgtcctgctgtcattttactgtctttgaaatgttttgattttgtaaagagaatcctgcaggaggaaggcctctagggtgttgttactattttttcatgaccctcttgtcccagatggtcattagatggtatattcactttgtgatgcttcactaagatatgcactgttctgtatgtttgttgtatctgaatagaaagttgtttttttttttttttttttttttatgaagtaggttgtaggggactgagtcctcataaccctaaaagaagaactccattaagtcaacatttcttatatgccaaatgacaagaacgtgaccccatacctcccacccttccagtgtagttccaggttatggtggggataggacgatgttgctagatactttttaatggactaatgatgacttggggttatgagtttaactgggaagatttcaccaattgttcatgtgtcttattttatatattttaacatttaagaaatgctaaacccaagcctaccttttagtctctacttttatcataatacaaagctgttgttccacttacttggttcatcacagcaggaacatatgttgattgtttacattttgttattgttctttgtatgtttatcttctgatgcagctgaggttccacttgcatgggaatcacttgagggaattattaaacatgtatattccaaggttccactgaagacctactaagaaataatttttggccatggaggcctgggaattttcattgtaagaagtctcccacacaattccccaagtgattgatggccattattctgccatctagccagactatcaagcatcaactcaacttttatttccccatgaaacaattacctgtgcttaggaagatccgcctctgaatgcctagccgtacttattagctatagttcttgtgcaaatttttacttacctcattgcaattttatatctctgttgtctctgtcataagtctcaactctgctactaaagaagccctagataatatatagctgaatgagcatcactgttttccagtaaaactttatggacaccaaacttttaatttcaagtaattcacacatgtcatattattacttttattttttccagccatttaaaaatgaaattcttagctcacaggctgtacaaaagtaggcagcagactggatttggcccttgggccatagtttttgccaatctctgctctagactattatcccaacacaatattggtcaatatacagtaagtaaatatatgagtactgagtgaattaattgtaacactcgtgattttacacagagcatgcatatgatctagtatactgactgctttgtaaatatgtgttcaataaatgtttattaggtcaattttcaaactcaagttaataccagagttatcagagttttctgtttctttaaataaactgcttttttctccactgtgtgttggaataggaaggccctaacagtctgattaatgaagaagagttctttgatgctgttgaagctgctcttgacagacaagataaaatagaagaacaggtatatctattattgaaaattctaagctgaaatttattttaacactataggcattccttggtgtatattatttcatgtaaatagaatttgaacattgtgaacttaataacctagaagcttaactgtgaatacattgagtcacaaatgtaaaataatctttttttttttttttgagacagagtctcgctctgttgcccaggctagaatgcagtggcgcgatctcggcttactgcaacttccacctcctgggttcaagcgattcttctgcctcagcctcccgagtagctgggactacaggtgcgcgccaccgtgcctgactaaatttttttgtgtttttagtagagacggggttttaccatattggccaggctggtctcgaactccagagctcatgatccacccgcctcagcctcccaaagtgctgggattgattacaggcatgagccatggtactggccgtaaaataatctttataagtcagttcctttatatgtgaatttccaagcaatagaaagaaaaccaataattgttaaaaggaaccatgcgtaattaacatgaacttaaatagaaatgctctttttgcttatttccctttaagtgtccagcttaaaacattcttttaatataaagcatatatttagtctaagtaaaaagcttctttgaatttttcttcaccaagtatgatatgaaaaggaagatgaccaaaaacttaaggtttttcatctatattagtattgtttttattaacccctttattaccttcactacttcaccttcagtttctttctcacttttgctttgttcagtgttttgtcatcattattgagtgtatagcagttacacccagctgctgtggaaattgaagaaaagtatttcttaaacccattaactagcttcaagattaatttgatactttgtcttctttaatttggcaacagtacagttaccatacgttacaactagatggtacttaaggatgaattttgttatttcctccccttgtttaagctatgctagttatggtggaagcttaacctttttggggggcaagtattaataaactgtggctacagagtatcttgccaaataatcatgtatgtgtcagttttatactacaaatgaatttgcatagaaaagttggcttgttcgtttcttatcattgctaagacagtcatggctattatgctcttattggtctacctaagggtaaatcacctgcagtagtaactgcttctcatgtgtatctttcgttatttttttaaaaattactgataaaaagttcatgtcacattaatttgtaaagcttattgctcattttttttatacccaaaagatgctatgtaccactcaagaagagtgggaacttttagttcctaaatgggctctacttttggaaacctaaagtactacctgaagtagcattatttatttgtttcccttagttttttgtctaggatgtgctgttttgggaaaaagtagtgaatgagtcaagacacctcagtcttactcttagttttacctctaactaactttgtagctatgaacttatcactgaattctctgggccttggttttctaatctgtgaaacaaaggagacaagatgattcaaaacatctcttctctctaaaatgctactctactgaatatcagtatggtgattgagttgggtttgagagaattgatgaacccttccgtaagctttagaaaaagaaatattcatggggccatccaatcaacttcattctattcttgacactgtactagatgctctgcaaaatagtcattgaacagagcattgtttttcttgcctaagagccaggcatgttgatatgacagagatacagtgtggtaatactctatagagtagtgagagcttcagtaatccataaaatcagttccatagatttagatcatttccctcttcatattcagtgtatattgcacagatctctcaacaacacagccattaaatagatattctccaagtgacacttacatcacacatgtttgagtttacgttacttgcaaacatagggaaagaaagatacatgggataaactggtgcatgagaaatgagatcttagcagttggttgaaataaatgagaacaactgaggcaaactaaagaggaagaagggcaagtggcagcttaacaggagtaagatgatgagatgaagggcagaataccttcatggagaggaggcaaagagatatacatgatatgttcttaggaacataactgaagcaaacaatgatattatttctaattatatataaacctgtgagtcagccttccaggggcggcctgctaaggtagaatcattggaatgatttggccagggtttggataggagagaattggcagcagcgttaagattgacccatgataaataatgctatgcaggtagcagggagtctgactaggagcaaaatcaacgaacttatcccttgcctaacatagtatctgtggagtcagaaagaagaggttaaattgggatatctgaggcaagtatcaggatttgccatgtctgcggagtagtttcataattctaatggttataagcactaaggcgttcactaagtgaatgttggtagttccaggttatattatccattcttgagttacaaaatacactttaaaaccttcccatcttaatattatatgtttttttagtcacagagtgaaaaggtgagattacattggcctacatccttgccctctggagatgccttttcttctgtggggacacatagatttgtccaaaaggtaagctaatgtcagagtttactaaaagtacaccttgtattgttcttcattgttggtggaaatatcttttatttgagacggagtctcactctgtcaccagagtggagtgcagtggcgcgatctcggctcactacagtctccacctcccgggttcaagagattctcgtgcctcagcctccctggtagctgggattacaggcatgtaccaccacacccagctaatttttgtatttttaatggagacagtttcaccatggccaggatggtcttgatctcctgaccttgtgatccacccacctcagcctcccagagtgctgggattacaggcgtgagccaccatgcccagccggaaatatcttgtagtatataagttttctccccttttcattaatttaagtaatgagactgtttttggttttatatattgtattccatatacatcctccaaaacagttagaaattttgttctgaaaataaagttctttcatttttatttaaggggaaagttgggggtgggcaaataaggagtggctagtccaaaatagttaaccagaagtatatccagttatactaaatctctctcttctttggggttaaatggtattactttgtattattggaagcactacattcttttttggaatgattttggaacataatacataataggtgcatgaagtcagcagttgctgctgtgcttgtttcatatagtgctttgttttctcttccctttatcttgtgtttggaagttggtactgaatgctctgttgtgcctttgttctgattacttggttttttctttgtctgtctctggtagccctatagtcgctcttcctccatgtcttccattgatctagtcagtgcctctgatgatgttcacagattcagctcccaggtactgtatgaatgtatagagtggacttgagtctttctgtgctatatttcagcctgctttcccagttcctagaaatcttttggttaggccactgattttagttttgaattttaaatagtaacattaagcattaaaaaggtcttccttgtctactaaatagttcctctgtcaggtttgcatgtgtcctttactattcacagcttggaattttgtcatataggaggtactccagaaagattttcaaactgaattgaaacaaatagaagatactgggttttgtatatcatgtaatatctgtttcttcagtcaggatttagcagttttgatggacgtggtctatatgatatgttatagcagaaaagcagattttaacagtctcacttttaagctaaagtatctccaaattatattcaacaaggaaatcactttttaataatatgtttcatttccattataatactaagctctattgagcagattgtgttttccttatgcaaattacctttggatattataaatgaatatttctgttcatatgctaaatctatggaaatttgttttaatttttagcattggtaagggtttaggaatttaagacaggaagctggatgcttgcggtctctaaagtctgtaccctcaaaataaaatcagattaccattggaagaagttttttttagtgtcagcgttagttctttttttaattttcttaatcttcacatctttgccattcaactttttatctttctggtgattgcattttattggactagattatattatgttaatcttatattaaagacctgagcactctggtcagaatgactcagtttaaaccctggttaggtgtatgatcccagtaagttttctaacttttttgtgcttcatttttatgatttagctagaacctgacacataataagtgctcaataaatgttaccttgtattgctattataacataatttctttgagctaataaaagttatctacatcattattttttcctctgtgagagtattgctataaaagtttttaaaagtcatagtttaaagagatttctattatttttatgtttataaataaagtttacattagtttttaacctgcaatagagaagaatattaagactttaatttttctgacttgtacagcgtttttctccttgaatactcttaagaaaaagatttagcaattctggatcagaaatcatccataaccaaatataccacagtatattttaccttttgcttgtccatttatgcatttttttttaattttacttatttattttcgagacagggtcttgctctgttgcccaggctggagtgcagtggcacgatctgggctcactgcaacctccatctcccaggttcaagcaattctcctgcctcagcctcccaagtagctgggattacaggcacgcaccactatgcccagctaatttttgtattcttagtaaagacgggttttcaccatgttggccaggctggtctagcactcctgacctcgtgatctgcccacctcggcctcccaaagtgctgggattacaggtgtgagccaccatgcccggccctgcgtatgtttttaaaaagagactcatattcataatgaatctgtgacaaaactacataatactgggagactttggtttattgtgctaagctccacattgcattaaaatcatatcacagactaatcaaaaatgcaggaatacataggctataaatgaaagaaaatataatgacagcaaagaaagaatgtaagccagtaataaagaatgcctaagaattaggggttcagaacccaaaccagggccctcactgtagtgctgtagaacagctgaattgcttttaagtccaggtaactatatcactgagaagcaggtgcctatatttttacaaaattttgctgacagcttacttcttcgtaatattaataaccttttgtaaaactcatgtatgtaacttgagagaaatcttgctggatttttttctctaatatatggtgctcatgattgatcagatcctgttttagcctttgattatgtactgttttatatgccagaagaggtaaaaatgaagaaaataacattaaggtcttcaagtatttgttgtccttgctaaagcattagttgtcattagcagacgtggactctagcaattcactgttgtaattaaattgtgtgccttatgttcagcagttcctttataatagatgactaattcccaattgataagattttttgtttcagaggatgttacactgccttatcagccattatcaaaggatctagcaagttgattctgtatagtcacacttgagaatatagcattggatgtagatctggagttaatattagttgagaaacattgtgttatctggaaaactcttccagttcaacacagtgtaaaattatagtagtgactatacagtagtgttacattttacagttctcacaccctatagagacttttgtattaagcaaaataagaggctcaaaggttattcattaacattagaaacacttatgttatattacattgcatcggtcttttctgttttttgttttttttttttttttgagacggagtttcgcttttgttgcccaggctggagtgcaatggtacgatcttggctcactgcaccctctgccccctggattcaagcgattctcttgcctcagccacctgagtagctgggattacaggcacctgccaccacacccagctaattttttttcatttttagtagagatggggtttcaccatgttggccaggctggtctcgaactcctgacctcaggtgatctgcccgcctcggcctcccaaagtgctgggattacaggcatgagccgccacacctggcctacatcgttcttaatacacaaatatacatcagttactccacagcgcttgatatgggaggtaaccaaattctttgttttataatatcttcataattaattaaaaaactaagtcgacatttttaatcacctttaataatttgccaaaatattatataagcataatataatcaattcttacttactccaacaaattttaaaagtccagatacagataccatatctagtttcttgatcatttatatcagctcccatacagaagccttctaaatctctggtaatttcactttgctgtttatataagtgttggctcatgactaccttgttcttcttgaaatgatgttttatagccttgaattggctgaaataatcaagtgtacaattgagagatgccctgaaaacagcttaaaataaaatatgtacatctactaggaaattagtaccaacacatgaatctgtctgatgggcagatattaggaatgaagtcactccagatctgagaaattaaagttgtaaaggactgcaagttctgtgtttttgttgttgttgttgttgttgttgttgtttgttttttcatttttgttttttgggtttttttgagacagagtctcattctgtcacccaggctgtagtgcagtggcacgatctcaactcactgcaacctccgtctcccaggttcaagcgattctcctgtctcagctgggattacaggcacacgctatcacacccagctaatttttgtatttttagtagagacagggtttcaccatgttagccaggctggtctcgaactcctgacctcaagtgatctgcccgtctcggcctcccaaagtgctgggattacaggcctgagacaccatgcccagcattttttttttttttttttttttttgtaaagagacaaggtttcacttgtccaggccaagtgcagtggcatgatcatagctctgtaacctgacctctgacctctgacttcctggacacaagtgatcctcctgtctctcagcctcccaagtagctgggactacaggcattccaccacacccaactaattgtttttattttttgtagagacagggccttgctatgttgcccaggctggcaagttcttgaaataatggctgtggccacaaactagaaaataattttcaggtgtacagagaatagaaagaatttagattcataaattgatcattttgttcacagttatttgcataacacagttcacatttaaaggtgtcaccttagaaatcaaaggggaagaacatcatcctctattgaaaaagaaagaaatcaaaggatgtacagtgaatttgcagcttaatctatggggagcatcattgcaaaaaatggttctgtgtgaggctctttcccaccctttgtccataggagcacattattgttgtagtaattatttcacccctctccctttttcagtgtacaagtgatacatgctaattttaacagaacttgaaagtagaataaaattaaaataatagtttactaatattccatttatcttctctcatatatatgagataaatattaaggtgtatgtacttatccatatgtgcctgattttttaaaatccttgtatatgcatctttgcacccttatctaattatttccttagaatatattcctagaagcataattgtgggaacaaaggccatgaacattttcaagtgtttattttattattttattttatttttattaattttgatacagggttttgctttgttccccagactggagtgcagtggtgagatcaccactcactgcaccttgacctcctggactcaagcgatccacctgcctcagtctcctcagtagcgggggctaaggactacaggcacatgccatcatgcccagctaatttttttatttgtagcagagacgaggtctcactgtgttgcccaggctgctattttatttattttttaagagatagggtctcattctgtcttccaggctagaatgcagtggcacaatcatagctcactgcaacctcaagcgatctttgcctcagcctgagtagctgggactacaggcatgggccaccactctcagctaatttttttttcaattttttattttttgtagatatgggggtctcactgtgttgcctaggctggtcttgaacccctagcctaaagtgatcttcccacctcagcctcccaaagtgctaggattacaggccacaggcctcagccaagttttaaaaatttttactgccaaactcttcattagaaaagttgaaccagcttacattcccaggccagttttctattgatatagtagcactgaatattataattcagttaacttttgtcaatacggtaggctaaaagtgctatgttcttagccatctctcttttgggttaacagtgcactattttgttattaataattattctatctaacaagccccctctatggttttgtggctttgtagtaagcatagttgtatttccttttttgaggtggagtcttgctatgttgcccaggctggagtgcagtggcgcgatctcggctcactgcaccctccgcctcccgggttcaagtgattctcctgcctcagactcctgagtatctgggactacaggcatgcaccaccacgcccagctaattttttatatttttagtagagaggggagttcaccgtgttagccgggatggtctctatctcttgacctcgtggtccgcgtgcctcagcctcccaaaatgctgtgattacaggcatgagccaccctgcctggccaacatttcttttacatgcataaaagagatctgagctgtttttgagcccttctagactttctttttttttttttttttttttaagtagatgaggtcttgctatgttgccgagacttaacctcaaactcctaggcccaagcaatcctcccaagctgctgggactacaggcatgaaccaccatgcccaacttagacttttattgtactatcaaaaggcaattttcttttcaaatttctgggtaatagtgttagaaaaatcctacttggtaacatccagaaatggcatcatactgagtgattcaaatgtgagatggaagaaaaggttagaattggagtgaacgtcccctcttatctcaaatgtattttatctccattttgtttcatagtttattagtttgaagatgctttgaatgtcacctaatcattttcaactctaggtccagaaaaatcaagggcatgatttctgaaattacacttagcctaattaaaacttagaaacactgttcaccttcttcaatgtttttgactgagtctttttcatttataagtgacaggaggtgttactataacattatttcctagaatgtcaaattttgagcctaatagcatggtaaatttggctatatttgttgttttttgtttttgttttttttttaatgaaacttagtatttccttgtttcccacttcttttttttttttttttttttttttttttgagacggagtctctctctgtcatccaggctggagtgcaatggcgtgatcttggctcactgccacctccgcctcgcaggttcacgctattctcctttcacagcctcctgagtagctgggactacaggcacccaccaccacgcccggccaatttttttgtatttttagtagagacggggttttaccatgttaggcaggatggtctcgaactcctgaccttgtgatctgcccgcctcagcctcccaaagtgctgggattacaggcgtgagccaccgcacctggcctcccacttctttttaatatgtcgtgtcataactgaacagtaaagtgagcagattatcaggttaaatctgaagtgtcagtctggtcaccagtgcccaagttactgcccctatggtaatattggttactttgtattttcctacagcaaacataaaatttgttatagtgagatttttacctgtatacctctcttaactttaatgttattacctcaaggaagatattatcatgaatgaagattccatgatgaaagttttgcagagtttattgcagtaatttagtacttcattagaatctttagttttttaggagcacagtactgaatgtttgtttctttgttggaccttttgaaaaccggttttccattgatgcagtgtagctgttacaggaatatcatttttaaaacgtttttatacagcatggctgaaaattgaacctgggcctccctcgtggcctaccattgaaggaacagcattttttgcctatctagaaagacaatgttaaatgtgctatctatatattttttaacttgtgctacctactacgcgtttatatttgtggaatctgttttcttttggacaaaaccacaaatcaaaaacacctcatttcttaggcatttgaaatccctaattcagaataatctcccaaacagaaacacaactacctgcattctttttgacaaaagagctaagtagcattagaaaattattttaaacccaattctgttttttaacagaataaaattcttctgttcttcacattcttctttcataggtaacctattgaaagtagggtttatttgggggaagcatttctttctgtctcttatctcataataaatacaggtgtgcttaactactagtttcctacctcaaagatatactcaaatctaaagatgtttaagattttgggatctgaagagtaaacatttctcctaatcacaatgtgacagagacaaatgaatcaagccaatgctacttttatttatgcatactaactggaacttttctttttggaaatcagatacattttgtatgtattagtaatttggaatcctgcattggttatcctcgccctcccaaagcagattctgaaattataaaggtgcacaggttctccatgcaacaccaaaagttatattttccaaggctttgtaaaattgtagaatgtcctgttaaatttctgtcaaatcagtaactcacactgttttgagaattatgaataaaggaataaaatattgttagtgtttatttagtacaaaagtagattatagaatctcagcatttttgtcaaaaaatttctttttgatgattgacagatcaggagacacttaaggccatacctgctttcagtaatcaaaaatgcatttaagatccagaaacttgaggtagcagaacatcactatcacatataacatatcctttggtatagaaaattatattcccagagtgagtttcttttttaaaaccattaatgaggccaaggtgggaagatcacttgggaccaggagttcaagaccagcctgggccagatggcgagaccctgtctctacaaaaaattaactggatgtggtggtgcactcctgtagtcccacctactcagaggctgaggcaggaggatcccttgagcccaggaaattgtagtggcagtgagctatgatcatactactgtactgcagtctgggccacgaagtgagaccgtgtctcttaaaaaaaaaaaaatgttaggcatggtggcacaggcatatagttttagctacttaggaggctgaggcaggaggatcacttgagcccagaagttcaagattacagtgagttatgattgtgccgctgcactccaacctgggtgacaaaataaccctgtctctggcgggtaggggggaagttgattatttactttgaaatatgttcaaaactgattcctgttctatattcctaatgaacagaatagactttatataaaacaaatagttaaacttaaggataaaattttaatggaagtataatatatatatcttccagctcttctgtcttctaatgtatttattacagaaaatgaaattactttgtttccgcaatctttgtatcacttcagttctccaataaatctgagaattctggtagtgtgaaatattcagctttctttgcttatttacataaaatgtataaggacaatttgtgataattaagagttacatttaaatatcaggaaaaagttataaatttaaattaaaaaattttaaaaggaaattattagaaattttaaaagaatgaactaaaaggtgattatatgtaaatgcttgcatatatgaatattagcattgtccccaaaataatttagaacaaagaaattggaatcaaataaataaaggtttgattatttttaaattggcttatattccatgataaaagagaggtttatcagtggcataagaaaggtttttcaccttttttgtattgaaatctttgacatatacatatatatctttgctcatctttgtgtatctttgctcgtatgagagcaaagatataggcaaagatatgctctctctctctatgtctttgttcataccagaccttcctgatatctccacataatcttaaatataggaacattagactggatgatctctgtgccccctttatctctactcttccattattttatactttaacacatcatctctgttttatgatatagaatggaatatttcttttttcctgaaaatgcttattttggtcacttgatacacattaggccaatatgtgttacttgagtgacccatcttccttcttttcatttctgtctcctgtcattaacctggatatctggaatgtggactaaactcttcaaacactatgtaaaacctactaacctttgtgcatttggttgctcagctactaagagcaccatttctgaactgaagttaactgaagaccattctgttttagagattatgacataccttttggattctcatgcctttttcctcccttctcaaggttgaagagatggtgcagaaccacatgacttactcattacaggatgtaggcggagatgccaattggcagttggttgtagaagaaggagaaatgaaggtaattccccctgaaatgttatagattgccaaaggcgtctctgtttcagtcatattatcattactattgatatgaataaggatagcactttcaacttacctttaaaacaaattattacatgtgatcaaagcagtaccatatattgagcaataaaatgtctttttgcttttctggctttgcctttactaaaggtttttatgattataatataaatatatgattaaacctttctgttttgactaggccatgaagaaaataaaatttagagaattagatatgaccaggtcacaattagctgatggtcctgtatttggatatttccttttgttttgtttttttaacatactgaatgttgtgcctagatgacactttgtttctctccctttttggtctataccctccttcttttcccttctcttactgcacctttatttgatatttggacattggtcagttaatcttgtttacatccctaaacacaaggacagaaaataagagcagggactgagagatacagagatggattgaaaagcaaaagcaacattgaattttggattttctcattcctaaggaactatgctaaataaagatacaaagataataagacactctccaagctaaagctttagttaaggaaaaagaatattgacatttaaaagatactattggccaggcacagtggctatgcctgtaatcccagcacttttaggaggacatggcaggcggattacttgagctcaggagttcaagtcaaacctgggcaacacggtgaaaccccgtctctaccaaaaatacaaaaattagctgggtgcagtaccacacacttgtagtcccagctacccaggaggctgaggcaaaagattccttgagccagggaggtcaaggctgcaatgagccgcgtttgtgccactgcactctagcctgggtcacaaagtgagaccctgtgtgagatatatatatatatatatatatatatatatatatatatatatgcatgcatgctatacttggctccatctgataatgtactgagtgaagagtacagatgagtggtggagaaaatcagaaaagaaagatctctgtgatttgaaacaattagattgttttacaatgcagagaagcatttgaactacatctggaattaaaaagaaagttgtgacaagggtgaggtgagggcattttaggaaaaaaattataatgtgagcaaaaacttgaaagcaaactttttagtcaggattttttgcataatctatgttgaccagaattattctagcaaataagatataatattagatgctgggatttcctctccccttgaataaggaacaaagtaagacataagataaaacagacagataaatgagataccagaatgttagctataattctgataaggtgattgtagaaaatagtttgagatcagctgctacagggtcttgttactccagaattaagcatgttcctggcattgctggataatcacaaaccttcactacagaagcaggccaggatgtatgctcttcgcggaagaaagggttgagccagacctgccttatttcttcttctgtagtcatcgttcagtcaccgtagagtcacctccctctggggaggaggaagtgaagtactaaagagaagccaggagtgatggtctggatgacgtccctctacctggaatgaggaatagaaaataactactcctacagcccacagtgttagagagaaattgggcctagataatgggaagcataaagttactctctaaagagaacaatcgttgtctataacaattgtctacaacagtagactagccactgtatgaaaagtatctttttttttttttcttttttttgagacagagttttgctcttgtcacccaggctggagtgcaatggcatgatcttggcttatcgcagcctccgcctcctgggttcaagtgattctcctgcctcagcctcccaggtagctgggattacaggcacccgccactacgctgggttaatttttgtatttttagtagaaatggggtttcaccttgttggctaggctggtcttgaactcctgacctcaggtgatccgcccgcctcggcctcccaaagtgctgggataacaggtgtgagccactgcgcctggcctgaaaagtgtaattttaagaagatcaagctgatagggaagaaactggagaacaagcagactacttaaaagagtcaggcacaaagtgatgaaagcctacctagaacagtagaaaagtcaaactgttggatgtcttagcgaagacattttagacaaaaaataataatgtgagctagaggcctccctgctctgcacctttggcaccacatctaggaactgccagtgccatggtgtcaatagattcctgcctcacccctaatcatctcttctatgctttattaagaacagtttttgactggtggcagtggctcatacctgtaatcccagcactttgggaggccaaggcgggcagatcatctgaggtcagaagtttgagaccagcttggccaacatggtgaaaccctgtctctactaaaaataccaaaaattagctgggcgtagtggcaggcgcctgtaatcccagctactcaggaagccgagacaggagaatcgcttgaacctgggaggcggaggttgcagtgagccgagacggcgccattgcactccagcctgggcaacaatagcgaaactctgtctcaaaaaacaaaaaagaatagtaaagagcttactagctgtgtgaactgtaaagggaggaatcaaaagtctagagtttctagtttgggtagctgggaaaacggtggtcccaataatatgagtaataaataggtaggggaaggtagtctgttgagagatactctaagaaaatctatgtgaaatgcctaacagtgtccagccccataggtccttcataaattggcacttggttctcccccatgatgacatgtttcatttctcaagagtatttatcacataattatctaaagtagcaaactctataattttaaaataattaattttacttagcatttaaggtatgtaacctcagtatttaaagcaagatagatctgtatttacgtttttgccatcttagctttcagccattgatttaacaaataactgagtgcctattgtgtttcatatactattctagctgttggggatacagcattgaacaaagcagacttaatttagtatctttaaggagaatatattctagccaggtttatttggttttcttagccatgttaaacagtcttttgagaatggtaaataatgcctaattcaaattgatacatttatttttaaacaactcacaataagtcatttatcacatatgcatgtttttatctgaggtttaccttggatttataattttaagtacttttttgtctgttaatttgaaatttttaattttcttttagcagaatatgttctataaatagactttcataaaaatctaaagagcagctgtattaaaagcatgctttcctgcttttatgggcttgatttttaattttcaaacagttttggaattatgttctctttaggtatacagaagagaagtagaagaaaatgggattgttctggatcctttaaaagctacccatgcagttaaaggcgtcacaggacatgaagtctgcaattatttctggaatgttgacgttcgcaatgactgggaaagtaagctgtcattattaatatattttaatctattattttgaatttaatatcaaatccaacctagttttctgcatctcctacatagtttacaaagtcaacgtagaaagtatttggaaaatcatatagaggactagcaatacatttatgtagagcttttcagtgtatgaaatgcttcctagtatgtaatttgatccaataacctcagtaatcctacagtgataggtaggtattattgcttattttacatacaaataaagtaaaattcagataggcaaagtgacttgtcaaaggcaacaagagctatatggtggagaagccaagactgaaattgaagatttctgtttcatcatctactctttcctaaactgtttccgtggtaaatcctaggtgaatccttttgtgattactttagaattattttatttttttagacagagtttcgctcttgtcacacaggctggagtgcagtggtatgatctcagctcgctgcaacctttacctccccagttcaagtgattcttctgcctcagcctcccaagtaactgggattacaggcgcacaccatcacgcccagctaatttttgtatttttagtagagacggggttttgccgtgttggtcaggctggtctcgaactcctgacctcaggtgttccacctgccttggcctcccaaagtgctgggattacagatgtgagccactgcacccagcctagagttattcttagtgtgtattccccttagacacaaaatttcctaagtatagatacttctcaacatcatcagatgtttatcattggcagtttgacatctctttttcacagaaatagccacctaagattagatataacaatttatttaacatcaataaattggggaaaagggaagggttttagtgttagggaattatttgtgcctgagtgatgcagtggtgattagaattgctttcttgctgtggaagatagataattgggccaaagaaaatgaggcttcctggtgatcagacctcacatccctaatctgtaaccataatactaagtattagctaccttccatttggatgtaacctagatagggcaggatcctgttcaatttaccatactgtccattcgtacttgactttcaacataagtgaattgatcacattctaggaaaagataatatatctttttattattctcttcatttcagcaactatagaaaactttcatgtggtggaaacattagctgataatgcaatcatcatttatcaaacacacaaggtaaagatctcttcattcatcctaaaaggatttcaatgtagttcaaactcagacatatagattctctaaagtaaaattggggaggttattaaaagccacaaaaatccaaagactttattaaataatgattcatgaatgtcatgtatttaaaaggtatatcaacttgttcagaacagaaatatgtgcaggcaagaatctgagagatacaatctagaaatagagtgcttgataaagatcaacggttagttccctttgtgcactttttatttttaaagagacagggtcttgctgtatttcccaggctagtctcaaactcctgagctcaagtgatcctcctgcctcagcctctcaagtaattggaactactggtgtatgccacactcttagctttctttatacacagtttaagtctagaaaagagccttctgaaatactgaaatccatttaaatacctttctagtatctagtttctataagaggtaaatgatagttaccaaatatgaaagtgaattatagcttcctgtgacaacaacaataagggtaatggctagcatggtattagcctatgttaagactaatagatataaaagtaaatggattatctgaaagcaaagaaaaatcacagagcgtgacttgagaggttagtcatacaccagagcatacagaaacataatttaagttagctccctttcaccttatttcttctgctattcttgatatttaaaattatagaatcaatagttctcttgccttattctgctctttctcttctgaaaactgcccaataacataatgtgtatagcataataaaaggaattaaaattttggagagatccaccaaaaacagtattaaacattataaaagaaatgtaatgatttaataggtactttgtttttccaattcagtgagtgcttcatttttctttttaaatggtttttgagtgcagtatatgaaaacattataagtctgttatgtatttcttaaactcagtcttgtcatctgagacatcttatatctaataattaggagccatacttaattttacacggtagctgctcagaaatgcataacaattaagattctgtttcagcatacaaattttgaagtctaatttgaaatctaaaatttagtaaatgtcagaatattaattaatcaccctataatttggaatgaagataaatgaccaataatttagaaccaaaagaaccttattatctgaaaataatccatcatggaaaacaatctgctgaaggtattctgctagataaatagtagatggagggagggtcatataagttgtatcaggattgaaaaataaaactaaaaattattaaaataatcttatatgtaacaaaatttgttacagttataattatttgccaattcttggaataaacaaattgtcctggaatcattttttcaagaaaatcacattacattcgcagtgtatgtaactataccactcacactatatctgaaatttatcatcaccccaaacagaaactccgtactcattaagcaacaactccccattccctctcctcccattccataataatgttctgcttagactcaaagtctatagtgttatttacactacaatatttttccctttaaatttgacatcttttgcagtatggtcttaaaagagggctactggtctcttgatatttaagtcattctcattctttaaatttctatcttatcatcctgtggatttgtattcattaggtctaaatttgccaaatcttcatgtattacttactgtctccacacaatttacccaacactatatttatcaactacatgaaattttgtatctttaaaaaatgaatcatttcatcttgcaaatgatttgtattgtatgctatttattactctcagtaatcaggaatgacgctgcataacaaggactagtccagatacatatacgagataaccaaaataaaagtaacttaaataggataaaaggttttttttctcatttaaagtaggtagtcccatttattgaagacctaggctccatgtcattcccatagtatatgtttccccttgcataccttaatattgaaatatttaatctaagtgacttagaattctttctaatgtgatttgattcaaataagtcttttttcattaaatctttgaatctaagtagaacataatcatggagtatgaggagagaggaatggaaagttgttgcttactgggtacagagtttctgtttgggatgatgataaatttcagagatagcaatatggttacataacactgtgaatgtaattaatgtccctgaattgtaccctaaaagttagttaaaatgacaaattatacgtgtatatattttactgcaattaaaaaaatagaacattattccttttattatattgttctgcaaagctattaactctgttcataattaatcatttggtagatatcctcagatgctttccatttaaaatttgagagattttaccttcaattaagacatttattggcattacgtttctcttgttagttccatgttagatctgtttttcaaaagatttttacttctccacagagggtgtggcctgcttctcagcgagacgtattatatctttctgtcattcgaaagataccagccttgactgaaaatgaccctgaaacttggatagtttgtaatttttctgtggatcatgacagtgctcctgtaagtacatgtatataaatgtgtataattaaacaatataaagctaaatacacaatgcgggacaaaaatgataaacacagcccatacactatacttgatttgataatggttcttagattttatgttggattgactgctaggaacagtatagcccatgtgttgtctgagggcaacagtcatgcctatgaacattccaccagggccgtttacctttccttctaatgtttcgtgaaacagccaaaagggcagtacatacactgggcagtaggctacttcccacagttatctcttaagccgttatcaactgccagccaaacctctgtggtttaccacaatttagctccatttactacttaagaggaagggatcctgggcaacatggttagaccccatctctattaaaaaaaattttttttttttttttaattagccaggcctggtgatgtgcacctgtggtcccagctactctggaggttgaggcgggaggattgctttgagcccaggagtttgaagctgcagtgaactatgatggcaccactgcactccagagtgggcaacagagcaagaccttgtccccagaaaaagtgggtggggaggaatcctggtgtcatatcagcttggtgcttataagatttcactggagatacttttaagagttacgattttggttaacctaatataatattagaccagcagagtttacaaaatactgggtatctactgatgctttgttttttgttttggcagctaaacaaccgatgtgtccgtgccaaaataaatgttgctatgatttgtcaaaccttggtaagcccaccagagggaaaccaggaaattagcagggacaacattctatgcaagattacatatgtagctaatggtatgtattttattgtttttgctctttgataatgtggctgttcttgatcatgacctatatgacaacaatttggacaaatgcctttttagttcttatccattagattactaatttttaatttggagaaaggtatatcagaattactagagaatctttgaaagtacagatgtctgaatttcaccctggaactactactatatgagtatttctgaagctagagctggataggaaaattttaaaactttatccctaggtcactgtatatacccttcttttttttttttttttttttttgagatggagtctcgttctgttgcccaggctggagtgcagtggtgcagtctcagctcactgcagcctccgcctcctgggttcaagcgattctctgcctctgtagctgggattacaggtgcccacaaccacgcctggctagttttttgtatttttagtagagacggggtttcaccatcttggccaggctggtcttgaactcctgacctcgtgatccacccacctcggcctcccaaagtgctgggattacaggcgtgagccactgcgctcgacctagccttcatattaagcaccattttcttagatatttgcctcatagaacagatttattattaggaatataagcaacagtggggaaggaaattaagagttcttttactcattgtcagcctttttagctttctgaatcaatgttcccctagtccttattagttgctagttacatatttatttctctttgacattcattgtcaggctttttgttttctgagtcagcgtttccctagtccttattagttgctagttacatatatttgtttcactttggataggtcttttcattgcttgctttgggtccttacttcacctgctttgcacctggagtaatcattgcaacctctctcatcaaaagtcataccttctttatacagggccataactgctagtatgttcaaagaaacagttgtacctgagtaagttactatttcattatagtacagatttgtgaataatctgccctaaataaccttaagtggtgctatactaatttttgcaggtaatttcgggaactaagaacattgtagaaaggttatagatgctttcttatttgctgtctgattatgtctgatggatagtgttaaggaatgaagggttgggacttaaaagatcataattggtccagctgggtacagtgactcagcctgtaatcccagcaccttgggaggctgaggcgggcggatcatgaggtcaagagttcgagaccatcctagccaacatggtgaaaacccatctctactaaaaatacaaaattagctgggcatggtggcgtgcacctgtaatcccagctactccggaggctgaggcaggagaatcacttgaaccccggaggcggaagttgcagtgagccaagatcgcgccactgcactgcaccctggcaacagagcaagactccgtctcaaaaagaaaaaaaaaagatgctaattggtccaatgtgaggaatattttaaaaacaagggaacaaattaagtgcttcacatatgtttggagaattgtatcttaatacattttaattttcctttatcttgcagtgaaccctggaggatgggcaccagcctcagtgttaagggcagtggcaaagcgagagtatcctaaatttctaaaacgttttacttcttacgtccaagaaaaaactgcaggaaagcctattttgttctagtattaacaggtactagaagatatgttttatctttttttaactttatttgactaatatgactgtcaatactaaaatttagttgttgaaagtatttactatgttttttgatgttcccctatagagtattgtttcgttggtttttgttgttgtcgttgttgttgttttaaacagggtcttgctctgtttcctaagctgaagtgcaatgacaccatcacggctcactgcaacctcaacctctggcctcaaacaatcctctcatctcagccttcccagtagctgggagtccccacaggcatgtgccaccatgctcagctaattttttattttttgtagagataggggtcttgctatgttacccaagctggtcttgaactcctggcctcagacaatcctcctgcctcagcctcccaaagtgctgggattacagacatgagccaccgtgcctggccttgaaaattgtagtttatagcctttaaaacttaattcttttattgtttcctttttcttctaatgcttatgtaaagaaattttgatattatagaactgtagaattgtagaagtgcaaacttcctgtattctttcctttcccagaaactgttatttttgttgtatattcctccagatttttctgtgtatgtactgacatatttttgaatgttaaaatgtttatacttactattatacaaaattcttgttttataacctttttttcacttaacaatgtatcttgactatctttctttataagacatgagatgtgtaaaacatctcattcttttaacatctgttacatgcatgttgcagaatttattaactagtcccatgttaatgtctgagttggttccatatttttactgtcaaccagtacagcactgaacacctttatgcaaagaggtagaatctttaactttattttggtgttgttgagacaaagtttctctcttgctgcccaggctggagtgcagtggtgcaatcttggctcactgcaacctctgcctcccaggttcaagcgattctcctgcctcagcctcccgagtagctgggattacaggcgtccatcaccacgcccagcctatttttgtatttttagtagaggcagggtttcaccatgttggccaggctggtctcgaactccttacctcaggtgacctgctctcctgggcctcccaaaatgctgggtttacaggcgtgagccactgcactcagcccaaaatctttaactttttaaagtaagtgatacgttaacatgattaaaagccaaaagtggccaggtgcagtgggtcacacctgtaatcccaacactttttgggagactgaggtgggagaatggcttgaggccaggagttcaagtctagcctggataacatagcaagattccatcttgacaaaaaacaattaggcgtggtggtatacatgtatagtcctaggtacttgggaggctgaagcaggaagatcgctttgtctgggagtttgaggctgcagtgagctgtgattacacgactgcactccagcctggacaggtaatgtctgtcaaaaaataaataaataaagtcaaaagtatgaaaaagttatacagtaaaatttaccctgtcttgcattcaccatatagtattaacatatgctattactagtttcttctagaaagtttttaatgcttgaatgaacaaatacaagtgtattttctacacagatacactttttttgttgttaaagaagcagcagcatactataaacactgttcaacatcttatatttgcatttattttatcttgaaggtctcacatatttgtaaggagcttcctcattttgatggttatacagtatcccattgtatagatgtacataatttatttaatcagttctgcattggcgaatattacagtttccaatttctgccagagcagtgtcataattgtatccatatgtcattttgtacttgcaagtttatatgtgggaaaattaatagatgtggtactactggccctgctaggggtttgtgcataatttagatactacttttcatagaggttatagtaattgaccatctcaacagcaataatgaattggagtccctgtgtcccacagtttttcatacaacgtgtaaaacaaaactttataactttcccaactcattaggtgaaaaatactctctcagtgtagttttaattgtattcctcttcttatgactgagtttaagcctgctttagtccattgagaatcttttgtatagtactatttctataaattctattttgtaataacatttaaaatattagtagatattgccaattgtgatacacaaatggtaagcaataacatgaatattctctcattctcacctacactggatgttaaataattgactgagaaatgtatattcttgagtccttttctttagctaaaaataatagtcaattatataatgaaataattttaaacaagtctgatttctaatgatgtttatagtatgtctttcttttaaaaaatgcaaaagctaaatttattgtccgatactaactaatatcccatactaacataagggatattgcattgatgtctcagttgtttagctttatcccaggaaaaagggtatttgaaaatattaaataggttccagtcttagttacctgaatgattggtgttttggaatatagccttaccctttagggattctctcttcaagcacaagtgcactgcattcagtgtgctgacaatttttatatcttgtactttagaattgttatagctagatctggacacattacttcttatcgattctgagtctgtgccatatttatcaaataaaccagaaaactgatggcacgtgacagcaacaggcttatcaccctgcttcgctgtgtgtctctttgccatggcctctagggtttttaaagtggtgctgtttcactctatccaagaccagattttgtttcactctaactatatctgccttctctcttcttcactatgacctcactgaaacggcctccctcttgatgctttatgatgacttccttaccaaaggttctcagatattcaaccaagcaaggcagaaatacaactttgtattaaagcaagagaaatctgaatgcagttgtgtgtaaaacatgctctcaattatatttgagaagaataattttttaaacagttgaaagataaatggtaggatattagcagcatttgcttctagacttggatttagagcggtgtttcattgactctctgtgtgtgtgcatgtgtatgttcacagatttttcatttgtggacctgggagggaggagcttggaatctgaaaaaattcatctctggggaagagaggtctattgtttgtgggtacatgtatatgtgtgcaaagatacagctgaaaagattcattggcccaaactcagatttggctttttgagtccagattgagcttctttctaacaaagatccaaattcaaaccttaacatggtaaaatctttgttactgtaacgtaactttttttttttttttacaataattatggaagataaatgtatgaagtcgaacccagcattgaaaccctaggaaagcgaacattcttaattttggtgatggaaaaaaatagtaacattcaataatgtgtgtatcatctttagagaaagttctgtaaagagttaataagatccaaagttgtttaacagtaaaaactttatatatatattatatataatatatatttttatttattttatttatttatttatttatttatttatttatttatttatttatttattttgagacagcatctcactcctgtcgcccaggttggagtacactggagcgatctcagctcactgcagcctcaacttctcaagctcaggtgttcctcctacctccctgggtagctgggactataggcacacaccaccatgcccggctaattttttatacttttagtagagttggggtttcaccatgtttcccaagctggtctcaaactcctgagttcaagcaatccgcctgcctcaacctcccaaagtgctgggattacaggtgcgagccacctagccccgccagtaaaaacttttaaactcatttgacaaagaggtctgagcatgtttgttgattaaataaggcaggcctctctctcatagcttgaatacattttttaaattcttggtaagtagtattgtatgtcataatttttattgcaggctaagaggaaagaaatgccatgttgtggagtaaaaatccagagacctttcactgattacctctgctcacctatattgccctttttttttcaggtgcctgtgccccctttattttacacaactatgcaaattgtgaggccaaggatgtgactgcaaacaattaagatttgatttacatgaataagctttcttctccatgaaaatacactgtgtcacttcacacttggtctaacacacacacaaaattctcaccctaggtggcacagatacactcagcatgcaatattaagtacaatttccattttatttttctccagagaatagtccatcttcagtctttaaggactcagctccttacatgggctttggtgggggtcatggggcagcacccgcaggtctaaattggggtggaggtgttcgatccttctccttcatgagatcgattcctgactactttgttgtgagttgcacaactcacacagtaatatagcttcacataacagcttgggaagcacatagacatcaaagacactcgcttcggaaatgtccctgactgctgcgaccttcactgtgtttcaaatgacgaatttcttaatggccttgtccttgggcacgcatcaggcacggttcgtgcagcaaacaggctgcacgtggctgtggccctttttggcacaaccattgttccttcttttctttgtcatcttggaggcctggactgtagagaggactgttcccgtttttttttctaacttttgaaaaattccatatacctttgattccttgctgatggaataagttcaaatttgtaaggttaataattttgcattcataatgataaattttaatagagattccatgcattccatgaatatggagggtgggagaactctgttctggtagtcttgcagctgttcgtagcaaacatactgctgagttttttacttgtcttttttttttttttttttccttcagtgactgaagcaaggctgtgtgacattccatgttggagaaaaaaagaaaaaaaaaagctgaatgctctaagctggaacgtaggatctatagccttgtctgtggcccaagaccttggccttgtgtacaaaaatgacaaaatattgcaatagcaaagctgaacatctaacactagctatctcttgctagatctccttgctcagcatataactataaatacatgtaaaattacatgtatatggctatatttttatttgcttgctcctagaagagaaaaaaaaatcaactttgaatcacaactaggaattgatgctttaatttttggatactttttcagaatttttaatttactatggtccggcctaagatcctctgttgtatcaggttttgtgcacaaaagaaaagcacaaaagttgaatgcacatggggcatgtgctttctgtgcaccaaatatctggatgaggttcttttttcaggcctacagtcaaatctgtgtccagaattttttgacttttttgctttgtataatcatagaattcattgctgctgatttctataatgattcatgttgtcatgtgtctcttaataactgagggctgtcagtaacctgtgattttgccttttctatagtcttactcccatgaagaaccttggttctgatggagaaagtgaaaagctttatttcttcccctagatatctttatatttctattatattttttagttgtgtactgtgtactagagatttttttcagtttgttatgaacacaatttggtaagccctaaattggttctgcctgtctccaaacagaaacatctgtacaaatcttgttggtatagactactttctggaaaatggtcaagataagttcatgttttcttgaaatttctaagatagtatatggtatcacttgtttaaagcaaatcagactgagtttgacatttaattcaatatttctggtattcagtaacgggtatatatgtttgttcttccagtttgggtcagtttaaaagatatgttgcaaagtatacatagaaaatgtgagcaatgcctctctttgccttttgatcagaaacttcagcagagcggtaaggattccacatgatttaaactgaaatgcttttctttgttgctgtaagaacttaaaatgtaaaatacctttttcagtttaagtcctgtaaacaacattgaagcatggagatgaggcaaggaatagtactcactgaagttgaaatgactgcccacttcaaaatcttcattgtgtttacacaccagtgtatttatacaaatcagaggcattttgtagatgctttgctgacttgttcagctctgtaaaaacacagaaatcagacccattttgtaaagcggaaaatcatgttacatggaacatgtcctgtatatatcacatacatggtaatggagtcttaatgataagtgcaagataataatttaatgatgggattagtctgatcgcttaatatgcacaatcctggaagtgaattacttgcatcagatatagtgatatttattattctgtacagagagaaaaatacatataaaacatatgcttacattacatgcacgcggatttcatgctccataatcttttctattttttaatttacctttctgtaaatgatgtgcatggaatatgccttatagaaaaatgctgttcataatttgactacgtggaaaagtgcctatatggtggtaatgctagtaaggcaaataagacaaattatcatgttggtttactacatcaccagttaacattttatattgtgatgtttaaaaaagaaaaatttatacctcaaatgtgtattttattttacaatcagctgtggggtatggggttgggatgggagaatgggggggttggggagggcaggtttattcaccatagccgctgataagaatcttcaaaaaaattctatatgcgcactataaatgtttctctgtttgccatttctggtaactatcatgaacacagacagttaactctttcataactgaattggatagctttattttacagaagtatggcaagtttacaaagcaatatctaaatctaattatcattagttgcatttggactaaatgtgatgatatacttttgcaattgattctgtaaataaaaggattacactaaaatatttgtattaaaagaagaaaagataacattttacctttagataactgcacttgtacctcactagagttaatcccacccaatcagattgagaaataaattggggaatgtggaaagagtccaaaagaggtcagaatttggagaggtactggccttctggacaacatttagaccctctacaattattttcattaagctgattcctacatcctgaatattcatgttttctcatctacagatatttgtcttcccccaaactaaaagaaaaaaaactaccctttactctcttttctactcagttactcttttgtgctatgttagaaacttgaaatatattggtgatgtggggattttgtccctgactgcccactgtacaggacaagagagtacagtgtttcagttggaattcaggactcctggttttgaggtagaggatgatcactgcagtacttggtttggaattgccacaggggtagctaaaccaaaggagggttatatctgcaagggaggtgtaagaaggcaaaataaggaaaaggaggaatgggttttctatttgttcagtttcatcaactaatttatacacttaatacaacttcagtgtcaattgctattaagaaatttttagttgggctgagctggttctcttgtgaaattgtgctggttatctttaagcttatcagttatttgtccaattaaacacttttcaccagtatttagtccgagttgtacagacgatgtatttggattttgtcatggttcatctacagactcaaaacataatcattttaaagtaccttgggagtgtgtagagtaacttctataatagctttatgatcctgatgatgttttttaaacacaataaagttggatcttccatgttacaatcacagaattaaaaccagtatttaaagtggaaaagtattaaaatattatggacaaatatgctggcttgatttgttttccttaaccctgagatattgccctactctgaatagttaagagcttgaaattcagtgttcttcccgtaacccagttagggatcaagaaaactactgagttgcagcctaaatttttttttttttttttttttttggagacagagtcttgctttgtcacccaggctggagtgcagtggtgggatcttggctcactgcaacctccacttcccaggttcaagtgattcttgtgcctcagcctcctgagtggctgggattacaggcatgaggcactatgcccggctaatttttgtatttttagtagagacagggtttcgccatgttggccaggttggtctcaaactcctgacctcagatgatccacccacctgggcctcccaaagtgctgggattacaggcctcagccatcgcgcccagctcagttttttttttaacaaaatataacaggaggaatatatcaagtacatgacatgtaataaatattttgtgtatcttttgtcatatgtattacacatacgtgtgtaatgggttacagtttacaatgaatttcttactgtggatcacatccagaagttttaaaagattggtagagaagccatattcacttgggtgtttctaaaatggaagcacagtgctggtgaatgatacacacttattttgtaattgagctgtatgcatttaatcataaataaataatctcatttatttaaatctcgtttaatctcagctccacttgttgcactcaggtaatttatgccctagaacaaccatgaaatgggaagtgtggacttccatttcactcagtcagtggattcatattgaaaggcactgagcatatttctctcctagtgttcaaagatacatgccatccaaacaatgtgatctgtaaacaaaagccaactacttaatctggtgggatgctggagggaaaatctgacttgtgttgaatttgatgacagagaaatattatgtggtcctcattcctagagggattttctagggcacttttaactgtgcagtttttctttagacttgactttggcatataacctgcaaataaggtgtagttctaactagcagtttcaaatgaggttgcttttataggatcttccagattttcttgccattattcgaacttggttacaacagagttcatactatcatttatattgtctaccttttaagacacattttctgtgaacgttccacatctgtatactttgaatagccttgcacaaataccataagtgaagctactttatttggcctcttcattctctcttcctatagaattctgtgaggttagtactagaacaaatctttaagatctctgaagttattagaagatgccaaaccaggattttcctgtcacccaggctctgtggttgatgaggtggtgtgtgagggtatctccgccgtgtctgtaccggcactatgccttttctgactcctccccactcaacagtcctgtggaggtggtagcggtgattggtggtaccacccctgttttacagatgagggaacaggttggggttacaaacctactgattccctgactcttaagtttttttttttcccattagactctactttttaatgcctatgtgtaatatctagaatatagtgtttgatggactagaaagagctaacatgcttgaagactagcaattttggtgtatgggtcttagtcccacacttcaatattggcttcacaaaattccaaatacacatggttccttaacaatggttcgatttatgattgttcgactttatgcaaagcactacaaatacagtacactccaacttaccatggggctgcgttccgataaaccagtcatatatggaaaataccgtaagtcaaaagtacattttcagccgggggcagcggctcacacctgtaatcccagcactttggaagactgaggcgggtggattgcctgaggtcaggagttgaagaccagcctgtctaacatggtgaaaccccttgtctctactaaaaataaaaaagttagctgggtgtggtggcatgcacctgtaatccccagctactcaggaggctgagtcaggagaattgcttgatcccgggaggtggaagttgcagtgagctgagattacaccactgcactccagcctgggtgatacagcaagactctgtctccaaaaaaaaaaaagttttcaacttacgttattttcaacttgcagtgggcttatcagcacatagccacatcataaatggaggtgcttctgtcaaaagtacattattgttttattttcaacttacagtggggcttatcagtatgtagccccatcataagtcaaggggcttttataacgatgtgtcttacaaaatcccaccagatacagaaaggagggcagtaaagatgaaatttgatcacaattaggtgcttaaactttcttcctgtcctccagctcagaggatgaaacaggaaactgagtcataaaacactactacaaacaagcccaaggattttatcccagattttcaacccaaggatgagctgcaatataactatcactgttttgttggctgcctgccacagaatgaccactgaggaaataaagcgagctttggattcactgca

SEQ ID NO: 21 - DNA, 15649 bp, Homo sapiens
ctttccagcctcacgcccgtgggctgcagttggaacgatggcggcggcagctgccgccgggcctagcccggggtctggacctggggactccccagaagggcccgagggggaggctccggagcgtcggcggaaggcgcacgggatgctgaagctttactacggcctctcggaaggggaggcggcgggacgccccgcggggcccgaccccctggacccgactgatctgaacggggcgcacttcgacccggaagtttacctagacaaggtgtgtgcgcacggggagtgggggggtgcggggaggggggaagggaaccaggcccctgctatattgctcccccagatcatgcctccgactttttgtgaggttcaggagagcaggtgttcataagaggacgaacctcggccagggagtacgagcagctgaggcgtctgaggggatgtgagtaggactggactggcctgaggtgatgcggcatctgaggtcttctgggctgatgtgataggcccggaattgggggcgtggcccaagcgttgacaggcgcggggctgggcttaggccgagccccaggatttcaaatgctgacaaacaccaaacacggttgaacctagtaacccctgagctaggccacttagggccccctgcctgggattcctgacagccggcgggggtttgcggggtgggtggggatcagagatttcttgccctgaaagcctatcagctgcaggcaaggctgggggacatgaatgcctcctgacccgaacactaaccacccaacttcttcagctgcgtagagagtgccctctggcccagttgatggacagtgagacggacatggtgcggcagatccgggctctagacagcgacatgcagaccctggtctatgagaactacaacaagttcatctcagccacaggtgatccccacggggacacaccctccaaagtctcacagcccccattctcccacctgtgttgggaaaaccagcaagggatttagaggggggagactcagattccagtcttgtcctgacattattccattctcacctcctttcctttgagccttcgttgtcagactactatagagataatagctactctcagagggttgtcttaagtaccaaaggagagaaaagacaaaaggagattagttgtttattttttagagacaatgtcttgttctgtctcccaggctggagggcagtagcatgatcatggctcactgcagcctcgacatcccaggctcatgtgatccttctggatcctaccaaagcactgggattacgggtgtgagtccctggcccagcccaaaatgaaattttaaaatgaaatgtatttatctgaagcacttaaaaggccaggcatggtggctcatgcctgtaatcccagcactttgggaggctgaagtgggaggatcacttgagcctaagagtttaagattgacctgggaaatatagtgggactccatctctacaaaaaaataaaaaataaaaattagctggacaagatggcgtatgcctgtagtcccagctactcaggagactgaggagggaggatcacatgagcctgggaggtcgaggctgcagtgagctgtgcttgtaccacttcacttcaacttgggcaacagagcaagaccctgtctcaaaaaaaagaaagtatctatctgaagaagcatcccagacactaggctgggcacagtggctcatgcctgtaatcccagcactttgggaggccgaggcaggtggatcacctgaggtcaggagttcgagaccagcctggccaatatggtgaaaccccatctctactaaaaataaaaaaattagctgggtgtggtggcaggcacctgtaatcccagctactcaggaggctgagtgggagaatcacttgaacctgggaggtggaggctgcggtgagccaagatcacgtcactgcactccagcctaggcagcagagcaagactctgtctgaaaaaaaaaataataagaagaagaatccctgacatcaaggaaacctcagtaaggtgtagtttctcttattattgatagctttcttttctgctccagggaagaataggtggtcttgtccctccctttctttctcccttccttccctccttaactaagcaaagagagaagatgtatgatattaggggacacaaagatcatgtcgaggctttttttttcttctgtcctctttattctctagtgccagacagtgttccactgttttccacactagcttctgtgctgttttgaggagatgtactactcagacttttgtagtaattgtacacccacgtgtagtaagtccaggagccagatccaaagggtttacctgcagcctgtggaatgttctgggagcatctgtggggttgcattctgatgtcttactctcgtgtcacagtggtgggtgtggtaacctatacacattgttcttttatctgatttgaagcagattccatgagtaggcacctttctgttagctaataccagcatcaaaatggcaagaaatcatagtttctgtgctgggatatttctcacaggaatttaataagattacattttccatttgttggaatgtgtataataatattttgagacttagctctttttgtacatcccacaaaaggaacaaacgtttggaaaagtgtgaggataaccaggagcattgatgtcttagaagcttaagtgaggggccgggcatggggttctcacccgtgatcccagcactttgggaggctgaggtgggtggatcacttgaggctaggagttcaagaccagcctggccaacatggtgaaaccctgtctctactaaaaatacaaaaattagctgggcaaggtggtgcatgcctgtagtccaagctactcatgaggctgaggcaggagaattgcttgaacccaggaggtggaggttgcgtgaggaaggtgtttcaagacatagatttgatagacttgggcgagacactcaggaaagtaatgtagcatggagtgtgtgttgattgggcaagagagagagaaaaatgagaaaggaactaggtcctcaggaaggaggggggtggaacagagcagggatggaggcatcggcctcagcaaagggccgggagctcatctatggtagcaggaggggaagcagaatgtgggcagagccaggcagatagtagatgtgcagtttaactagaaaccttccagaatgtattagggatttggcttttatccacagagagctaaaacaaatgagtgatgtgctcagatttctggtttgaatagattcctccagctgcactggcaggaatggatggggctgagcacagtggctcatgcctgtaatccctgcactttggaaggctgaggtgggaggatcacttgagcccaggagtttgagaccagcctgtgcaacatagtgagacccgatatctagaaaaaaaaaaatagctgggtatggtggcacacacttgttagaataaacccagctacttggggaggctaaggtgggtggatcacatgagcccaggagctggagattgcagtgagctataatctcaccattgcactctagcctgggtgacagagcaagacctagtctcaaaaaataaataaataaataaaaaggccaggtgcggtggcttatgcctataatcttagcactctgagaggccgagacgggtggatcatctgaggtcaggcatttgagaccaggctggccaatatggtgaaaccccatctctactaaaaatacaaaaattagtcaggcatggtggcaggcatctgtagtcccagctactcaggaggctgaggcaggagaatcgcttgaacccaggaggcggaggttgcagtgagtcgagatcgcgccactgcactccagcctgggcaacagagcgagactccgtctcaaaaataataataataataaataataataaaaggacagcccacagaatgggagaaaatatttgcaagttagttatctaataaaaatctagtgttcagaacataaaaagaacgttttttagctcagggctaaaaagacaaataaccctaatttaaaatgggcaaaggatttgaatagacacttctccagagaaaacatacaagtggccgaaaagcacatataaatatgctcagcatcattaggtcttagggaaatgcaaatccaaaccacaaaatgctgcacccagtgtggaagacagtttgaccattcttcaaaaccacacacaagattaccatatgatcggcaattttactcctaggaatataccaaagagaattgaaaacatgttcacataaaaacatgtacacaagtgttcatagcagtgtttttttttttttttttttttttgagatggagtctagctctgtcacccaggctagagtgcagtggtgccatcttggctcactgtaacctccgcctccccagttcaagcgattctcctgcctcagcctcctgagtagctgggattataggtgtgcaccatcacacccgcctaatttttttatttttattttttgtatatttactagagacgggattccaccttgttggccaggctggtcttgaactcctgacctcaagtgatccgcttgcctcggcttcccaaagtactgggattacaggcaagagccaccatgcctggccaatagcagcactttttataatagccacaaggtggaagcaatccaaatggccatcaattgaatgaatataaacaaatatccacacagtggaatattattcagccataaaaatagatataacatactgacacaggctacaacatagattaaccttggaaacatgctaatgtttcatatgcctatgattccatttctgttaaatgtattctgtagcgaatagacaaatccatagagacagaaactagattaatggttgccaagttctaggagtgggggaataaggaatgactgccaagggttacagggtttctttaggggatgatgaaatgttctggaattacgtagtgaggttggttgtacaaccttgtgaatatattaaacatattaaaaaccactgaattggtatgtcaattatatcccaattaaaaagaaaaccaggcattgagccagatttggcctgcaggctgtagtttgccaacctctcacctagacattgagtttcattatgtaataatgcatttacttgtgtcaaaattagaaagatctcaaacattatacagggaaaagcctctcctaattcttttctctaggcaaagacaaagcagtctttgacagtacatttcactgaaaattaacagagcccaggtgggattatggctcatacctataatcccaacactttgtgaggcagaggcaggcagattgcttgagctcaggagttcgagaccatcctggccaacaggttatacctgtctctacaaaaaatacaaaaattagctgggtgtggtgttgtgtccctgtagtccgagctgctcaggaagctgaggtggaaggcttgtacctgggaggcagaggttgcagtaagccaagattgtgtcactgcactccagcctgggtgacagagccagaccttgtctcaaaaaaaaaaaaaaaaaaaaaaaaaaaaagaaaattaacagacatacagaaaagtgcacataagtggacagctccatggatttcacaaagggagcacagtcacataatcagcatccaggtcgggaaacagcataaccagcaaagccccctgagcctcctaccagttaccacccagtcccctcccaaggtagccaacatcctcgcatccagatggctttcactctccctggttacaaactgcttttcttaacaagcttttttttttttttttttttgagacagagtcttgctctgtcatccaggctagagtgcagtggcccaatcggctcactgcaacctccgcctccggggttcaagtgattctcctgtcttaggcttccaagtacctgggattacaggcacctgccaccacacttggctaattattgtattttcagtagagacgggatttcaccatgttggtcaggcaggtgacctcaggtgatccacctgccttggcctcccaaagtgctggggttacaggcgtgagccactgtgcccagcctgcttttcttaacaagcttgaaatgcaaagataaacagtgtagtctttgtgactgaatggtgtggatgctttcactgttgtttttggatatggtacaacttttatctccagtgtaatggctccatggctgggaaggcagcgacaatgacagcacacagcactgttgggttttcttttactctattttcctaacaacttagtgtttggattttaccctttagaagttggattcaagcttccttcttgaggtagcccctaagtgtcatgggctcaaacacccactaccaaaagagtctgctcttttcatggtagcttttggcagacctggaaggagattgtgtcacatggcctgtaaacaaaaccagtaattcactgggtgaagaccaaatgcctcatcaactgccaagcctctgtctgtctcccttagatcagtagcccatgatccctttacgaacctcagcctcggctctgcttttattgtttttcactgcatagcgctgcctttgctatgtcctttagttcaccatctatgaattggcaagaaaaattttcttgccaggcacagtggctcactcctgtgctcccagcactttgggaggctgaagtgggagcattgcttgagcccagaagtttgagaccagcctgggcaacatagagagaccccatctctacacaaaatttaaacaaaaattaaaaaattagccgggtgtgatggcgcttgtgtgtagtcccagctacttcagaagctaaggtaggaggatcacttgagccccagagttcaaggctgcagtaagctgtgtttgcaccactgcatgccatcttggctcactgtaacctccgcctccccagttaaggtgattctcctgccttagcctcctgagtagctgggattataagtgtgcatcaccatgcctgtagacagagcaagaccctatctcaagcaaagaaactcaaaataattatgatttccccaacaaaatgcaggcaatggtccctatggtcccaaaagtaatatagatgtttcacatcatgtgattttattccttagtaaccttcctttctatgaaatcatctctaagagggctaaatgatcctttcttgtggactgtgttgttaaaatgaaaagtccattttgctgatacgtaatctacctttccatgtaattttttaaaaaatcccttaatagctctacagatgtgagccctgtagattctttgtctcagacagttctttctcttatattttctctaatatttttttcctgcattttttgtttctgtttgtttcttgtcaaattgacatcaatgcttttctccttactcacccttccagctgtctccccaagtggggtagattcccagtgttgcttggagaacattcctacagtcccagagccacacacagaccaggtgtgggtgtgtgaaggctcacaagtgattgcagttagatatttccagattcttctttgtaaatgctgatcagtttgcataaccaccagcaaagaagagaatacctctttcaatctttgacaatctgagaagtgaaaagtggtatctcttattgtttatagtaacgtttacagggtgtttttttttgttttttttttttagggctttctatttattcaattattattatttgagacagagtgttgctctattactcaggttagagtgcagtggcacaatctcagctcactacaacttgtgcctccagggttcaagcgattctcctgcctcagccttcccagtagctaggattacaggcacctgccaccacgcccaactactttttgtatttttactagagacagggttttaccatgttggccaggctggtctcaaactcctgacgtcaagtgatctgcctgcctcggcctcccaaagtgctgggattacaggcatgagctaccgtggctggcctatttatttgattatatcatctgcaaatagtgatacttctccctcctttccaatttgtgtatctccataatacatctcgtgactctagctgagttggctaatgccccagaacaatgtagataacattggcaatcaaggttgtccttgccatgttttgactttaattggagtgcttctagcactgcctcggtaaacatgatactgagttttggaggtcagggaaatatttagctgctcatatgttattgagagttttttaaaaatcaagaatagatgttgaaatatctattaacatggcaaattattatgagatcctctaattttgagtcatcctggcattcatgaaacaaaaacccttttgtgtttatcaattattattttaatatgctgctggattttgtttgcttatttgtgcatctccatttgtttatttaattcatccttgcatctccattcataagagatatgaatgtgtatatgtgaggtatttctgttatgttttcataacagtgttatgtttgttccatcaagtttgtgtgagagctgttctcgtttctctgctggggcagtgtttacacagagaattggaaggcgctgtccttcaagccgccgcaacacccctggacatctgggccagatgcctttgtgtggaggggaaaggggagtaggacctttctttcacaacattctctagtttttctgtttctgttttcttgttttttgcaatccattttggtaaatcctatttttgtagcaaattatccatttcatccatagaattcaccaagcccttaccaatttagtgttttcttggtattttacccatgctgcaatttcagttttgatttccttttctgacctcataattggttaacaatgaggttttttcgactgggcacggtggctcccgcctgtaatcccagcactttgggaggccgaggcgggtggatcacttgaggtcagagaccagtctggccaacatggtgaaaccctctctactaaaagtacaaaaattagccaggcatggtggcacgtgcctgtaatcccagctactcggggctgaggcaggagaatcgcttgaacccaggaggtggaggttgcagtgagctgagatcgcgccactgcactgcagcctgggcgacggagggagaccctgtctcaaaaaaaaaaaaagaatgaggtttttttctttgtgatctaccatatggaaaggtttgtatatattttatggcattgtttgggaaaaatgcaaactgtgtgcttcctatgctctcacatcaccacaatcatgaccacagaagagttctgtgaccaaatgtgttgggtttcttccccacacaccaagcagcagacacccgctgggtgtcctctgatttaattccaacactatttacccagagatagcatcagattccatgagttgagggctgagtccccaagcctgcctcccttcaggcactagttcagtcccaaatctgcctccccactttcaggcactagctgcaggtcagggcctcaggcctccagaatttctgaccaactggctccaggtaggggtttccataactccctctttgggctcagtttgctggagtggctcacagagctcaggataacacatttaccagtttattacaaaggatgttacaaagggtacagatgagcaggtgcatagggcgaggtgtaggagaaggagcatggagtttccatgccctccccgggcgtgccaccctccaggagcctccagagctgagatcgcgccactgcactccagcctgggtgacagagtgagactctttctcaaacaaaacaaaaccaaaatatctcctgttacagatacacatttctgtcttatcctcttcgcctttctttatgaacattgttggtatgttcaatggaattagggaaattagttgggaaatgttggcagttgttggacaagagatgatagtggcttacaaagaaaatgttgcaggtagaccttccatgacttggtaatggattgattactaggtatattaatccaggttcatactgctgtaaagaactgcccgagactaggtaacttataaaggaaagaggtttaattgactcacagttcacagcatggctggggaggcctcaggaaacttacaatcatggcagaaggtgaaagagaagcaaggcatcttcttcacaaggcagcaggaaggagaagtgttaagcgaagcagggagagccccttataaaaccatcagacctcgtcgggtgcggtggctcatgcctgtaatcccagcactttgggaggccaaggtgggcggatcatgaggtcaggagatcaagaccatcctggctaacatggtgaaactccatctctactaaaaatacaaaaaattagctgggtgtggtggcaggcacctgtagtcccagctacttgggaggctgaggcaggagaatggtgtgaacctgggaattggagtttgcagtgagcagaggtcgtgccactgcactccagtctgggcgacagagcgagactcagtctcaaaaaaaaaaaaaaagaataggtggaattgaattgaggccgtcagtgaacagtcaggaacattggaaggctcatccatgtggatgtgcacaaggaggtgacaggaggaggagaagaggcagtgatggggaactgagaggagtgtcagaggacagtagagacagcaaagaggagggttgtggcttgatggcatggtcttcctagaagccggggttttgaagagaggagatctaggcatgatttagaagcatgaagggaccaggctcccaggcacctggtgtgtgaaaggaaaaacagcctccctaggcaggattctatcaggaccaaagggaaagggcccttcagagaagacagcccatgttccggaaagcatgtgaaaggctttgggaggtctggaaaggagatgagggtcaacaagaatgtattgcctcatccaggcagtgcgctggacacgcagatgcgcttgggagccagcggtccctgccttggctgcttgtggtctgatggagcagttgaggcacagtggtggcagctggctaagcacctgcggcctgcttcggatctggactaattctgagggccggctctcctgggcaccagggttagggggttacggggagtatgtgagtaacgcctgctttgggaacataaaccccctcccccgcccccatgtgcgctgtgacccacgccctcgcagtcctttctctggaatcatccatgcgcccctggagcaagctggggcgtctgtgaaggggtgggtgagaaggagctgaggttgcgcccgccctgcagtcacctgctctccccttttccccgcccctgccctcctagacaccatccggaagatgaagaacgatttccggaagatggaggatgagatggaccggctggccaccaacatggcagtgatcaccgacttcagcgctcgcatcagcgccacgctgcaggaccgccacgagcgcatcaccaagctggcaggtgggcgctgccgggcagggcctgcagtgggcctttcctggggctctggggctaacgtcaccctccgtcccccaggggtccacgcgctgctgcggaagctgcagttcctctttgagctgccctcgcgcctcaccaagtgcgtggaactgggcgcctatgggcaggcggtgcgctaccagggccgcgcgcaggccgtgctgcagcagtaccaacacctgccctcgttccgcgccatccaggacgactgccaggtcatcacggcccgcctggcccagcagctgcggcagcgctttaggtgtggcccctctgccctgaccccagcgctcccgccagccccgagccccatctgtgcccggctcctgggccctcctggagctgtccccctgccctgtgtgtgctttgctttcctgctcctgccccatccaccggcagccccggccctgcccttcactacctctccctcgtgcagggagggcggctcaggcgccccggagcaggcagagtgcgtggagctgctgctggccctgggcgagcctgcggaggagctgtgcgaggagttcctggcgcacgcccgcggccggctggagaaggagctgagaaacctggaggccgagctggggccctcacctccggctcccgacgtgttagagttcaccgaccatggaggcagtggcttcgtgggcggcctctgccaggtggcggcggcctaccaggagctgtttgcggcccagggcccagcaggtgccgagaagctggcggccttcgcccggcagctgggcagccgctattttgcgctggtggagcggcggctggcgcaggagcagggtggtggtgacaactcactgctggtgcgggcgctggaccgcttccaccggcgcttgcgggctcccggggccctgctggccgctgccgggctcgcagacgctgccacggagatcgtggaacgagtggcccgcgagcgcctgggccaccacctgcagggtctccgggcggccttcctgggctgcctgacagacgtccgccaggcgctggcagcacctcgcgtggctgggaaggagggccctggcctggccgagttgctggccaatgtggccagctccatcctgagccacattaaggcctctctggcagcagtgcaccttttcaccgccaaagaggtgtccttctccaacaagccctacttccgggtacgcctcctcttgggtgttccttgttcaacctgctggttgaccctccaaaaccttttatgccagtgcttgggaaactggggaaaccaggcactctgggtgtggtttcaggttcttatgcacggtctggggggtggggaaggctcagggcatctgcagctgggctgagaagcagggcatggtggggtccccagtgttggctttctctgcccccactcagggaagctgctccggggtacttagaatgtaggatgatgctgtcccttgcagagggggctggggcacttagagccccagcagagggtcattaacagccttacctggaagaggggacctgctgtggacctgggcaccttctcttgcagggtgagttctgcagtcagggtgtccgtgagggcctcatcgtgggcttcgtccactctatgtgccagacggctcagagcttctgcgacagccctggggagaaggggggtgccacaccacctgccctgctcctgctgctctcccgcctctgcctggactacgagacggccaccatctcctacatcctcactctcactgatgaacagtttctggtgcaggtgaagcactagctcctagccgggcagggaatggtgttgctgggaatgcagatggctggacagtgccctcatggccagaccccagaccagctgcctgtgtgtaccccagcctccaccttgcccaatctgtgcccagctcctggttggcagtggcccctgagctgcccccaccatacccactccctctgtcctctgcctccttggctcaggatcagttcccagtgacgcccgtgagcacgctgtgtgcagaggccagggaaacggcgcggcggctgctgacccactacgtgaaggtgcagggcctggtcatatcacagatgctgcgcaagagcgtggagactcgcgactggctcagcactctggagccccggaatgtgcgggccgtcatgaagcgggtggtggaggataccaccgccatcgacgtgcaggtgctgcccaggctggccggggtagccctgacgcaggctgggggtactgtcccttcaagaggggctggggcagcagaggatcactggcagtccctgcctggaggaggggacatgtgtatctgggcttctcacggggccagttctgtagccagggcgtccgtgagggaaccccaggggaacaagtctccaaggatgaagaccaaacgggctggggagtgcctatgtccacggtcttgttccttctcagcccaggattatgacatcttcgcccctattttacctgtggagaagcagaggctcagggttacccaggaagtcagggcagggttggtgctggtgctgaagattagacctcagaccaactcttgtatcctgcctttgccccactccactggttctataaatagcgaccatgtacctactaaatagcgggccccgcggtgattaccctgtgatccttgtgatgcttgagtagctgacttagggcatcctcagcaccgatgggctggtggtttcccctgactcgggcctccttgcagtacctctttttaccaccaggtggggctcctgtacgaagagggtgttcgcaaggcccagagcagcgactccagcaagaggactttctccgtgtacagcagctctcggcagcagggccgctacgcccccagctatacccccaggtctggctggtcaggggagccccagggggaagggacaaaagagggcgagggtgcagggcgggctctgattccttgtcttccccaatccagtgccccgatggacaccaacctcttgagcaatatccagaagctattctctgaacgtattgatgtgttcagccctgtggagttcaacaaggtccgacttccaacgtgactcagacttccagggatcccggggagggttggctggagcagccccacacctgcccaaggagccccaggactctgtgaccaactgggggtgaccctgaccctccagtctctgtctctagggctgtttttaggtagtacagagtgccctgcctccaaatcccacagcccttgtcccagtcttggtgtatgcccagcctgagtctgggtgctgacctgggattactgtttgcccttgtccttatccccacagtagtcttgggtcctccccagggttttctgttcacccatggtccctgccccgcctcactccaagctcagggatgcctctgattgctgggccctacctgtcccctgccctccagatgacggcgctaatattgtatccctcccttcttatctggccccggagactttctgcctcatcccagctacttccatcgtatgtctcccgggcccctgcttggaacttgggtgtcccccacacacacctgcagtccccaagctgcatccctgtgtccctgcctgcaggtgtcggtgctgaccggcatcatcaagatcagcctgaagacgctgctggagtgtgtgcggctgcgcacctttgggcgcttcgggctgcagcaggtgcaagtggactgccactttctgcagctctacctgtggcgttttgtggccgacgaagaactcgtgcacttgctgctggacgaagtggtggcctctgctgccctgcgctgcccagaccctgtgcccatggagcccagtgtggttgaggtcatctgcgagcgcggctaggcgcagccgctgccatgcaccggtctgtccctgcaccccatggcacccaggatctggtctcggtggtccttccccgcaggcaggtgtcaggaccggcctaataaacatgtgtggcctcctcctctcgcttgctgggcgggcctttccgggggcggggttttgaagctgaggcttctgaggcgcccgcgtcgggtccgcccccgagcgccgattggctggtgtgctgggcccagcatgggcagggggcggttccacttaaaaaccctgggacgaga

SEQ ID NO: 22 - DNA, 21694 bp, Homo sapiens
agtatggcttgggtaccacaacttccggtgcgcctttctttacagttcgtaaggttcataggtaagagaacagcgaaggttccggggctagtttgtgtttcagacttccatatttccatttgcagttgggtgaagtggttagagctgaaaggggacagctggagtcaaacaacttaactcaaatatctgggaacgatttcgcgctgaggaagaccctttgggacttgtagctccactccggggaacggactcgccgggactgacagttgccggaagtgaggctgcggggaatggccgccgctgcgaccatggcggctgcggcccgggaactggtgttgcgggctgggacctcagatatggaggaggaagagggcccgctggtgagagcgcggagctgtttctcctccgtagttccggtgctcctagcttcagaaagacctgagctgggtttaggcacaagggtgggaacttggctgctacccgtgatattacctgtttggctccccgtacccttccctgtgatcagacccgaccctgagcgggaccctagtggctgaaactcatgttctggggcacaaaatttcaacttcactccacattttggggtagagtcacgaagtagtatagtgtaaaggttaagaacatggcctctgaagccagactgcctgagttctatctctgccacttacacgctgtgtgcccttgggcaagttaaccagcttctctgtgccatcatttctcacacctttaaggtgaggaagatagaacctattgtatacatcgtcgttaggattagatgaatatgtgtaagattgcacctggcatgcaggtaaacactatgtgttttgacatttctagaaagcctggggttccccagaggtgtgatagaacacccaagatggcaggagtctgagggtcttaaatttaagtgcaagttctgctctatcctctgcaattcctagctttcctcattcggtcatctccactgcacttttttttttttttttttttttttgagacggagtcttgctctgtcgcccaggctggagtgcagtggcgcgatcttggctcactgcaagctccaccttccgggttcacgccattctcctgcctcaacctcccaagtagctgggactacaggcgcccgccaccgcgcccggctaattttttgtattttttagtagagacggggtttcactgtgttagccaggatggtctcgatctcctgacctcgtgatcttcccacctcggcctcccaaagtgctgggattacaggcgtgagccactgcgtccggcctccactgcactgtcttgtcttttacctttttttgttttctttagacgggtttccctgtgttacccaggttgaccttgaactcctgatctcctcaaacaatcttcccgtctcagcttctaagtagttgggactacaaggagcccaccaccatgctgggctacctccactgtctcactggatcgtctcactccttgtcgtattccttacccatcagcacaaaataggagagtgggtacaacgtgagactcttagaatttttcaaagcagtacctgtggctcccagtaaaagcagctccttctcacttgaaggactggggatatccaattatattttttctttctgtctttcaccgtaccctactcccattaacttatccctttccaggcgggtggtcctgggctccaggaaccactgcaacttggggagttggatatcacttctgatgaattcatcctggatgaagtggatggtaagcgatggcatggggtgggtgcagtacctgtaatctgagaggcatgggggctggaaggaataaggtagggattggtgtgcagatactcaatgtggggagagggagctgtggagctggacccttatgataaacttctatttccagttcacattcaggcaaatctggaggatgagttagtaaaggaagctcttaaaacggtgaggctttcccctgtactaatctgcccttctatctattctaccccaaaaggaaaaacaacagtctcttgcttttgttgtatcagcctggtatctgaccctttagtccttcactgattctgttacagtgtccctttactgagacttccttctgacctgtcatctttatgttctcccagggtgtagatctccgtcactattcaaagcaagttgagctggagctacagcagattgaacagaaatccattcgggattgtatcctccagcagagggaaggggtggtgctattgacatggggattttgtggcgtgtggtacagatgtcccagctggggtcaacatctctgaggtttctatcacttcaaagagaaattggagaggtactacaaatctgaggatctcccatcttcaccatgaggccccttgactttttgtggatcagatattcaagagagtgagaatatagcatctctacacaaccagatcacagcctgtgatgctgtcctggaggttagtaatcatgacctgtgacccctaatagctactctgaaccagatcatggactctggtgccatttttaggtcatcagcctcaagatggggacaggttagggtcattttcaagatgacttcaggagccttttttgttattactgccatatttaatgttatttcctgataatctggggtgtctcatcatctgccaccctcaaggactgataaatactgaagacttcacaaagagtctttggtggcccacttatcccctacaaaccctatagcactccggcaacatctaccctccctacagcgaatggagcagatgttgggagcttttcagagtgacctcagctccatcagctctgagatccggacactgcaggaacagtcaggagccatgaacattcgacttcgaaatcgccaggcagttcgggggaaacttggggagcttgttgatggtctggtggtgccttctgctctggtcacgtgagttaccagtttgaagggttataatgtccatagcaggtggatgggctggggtgacccaccctatttaccatatgggtctcctggctccaggttaagtgctttttagaaattagtagccaggttaaccaccatttctttaggtatgcattaggcatcaaagattaagattaagaatgatgtaagatcaggtgtatagtggggaggtccaggaatagaaaactttgtacatgtgtcctgactatatggtacaatgcaaggtggtagagatgacaggggctggaggtaaggagtgtggtctgggtctggtttagggatgtctgggtctcccttgtaactcatcccacccctccctgctaaccagggcaattctggaggctccagtgacagagcccaggttcttggagcagctacaggagctggatgccaaggcagccgcagtcagagagcaggaagctagaggcacagcagcctgcgcagatgtcagaggcgtgctcgatcggctccgggtcaaggtgggaagtagggatggataccctggaggctactggaagcagccttcccaagatcttcactatggatttccttggcagagctcactgtagcctgtctccagggacttcaccctgccttttctgggcagccccattcttgtctctctgggtttccctgaaaatcttgagaaataccaaagagatattcaccacccttctgcctatgtttaccatttgttgcttcccccagttcctctcatacagcaaaagggttgcagcttcatgccctgtgtttggttccccacatctaggcagtgacgaagatccgagagtttatcctccagaagatttattccttcaggaaacccatgaccaactatcagatcccccagacggccctgctgaagtacaggtcacaaccccaaggaagtgcatgggatggcctttgagtttttgagcggcctagtgtgggcatctggtttcttgggagacaggtagactgacatgttcctgaccccctaggttcttctatcagtttctgctgggcaatgaacgagcaacagcaaaggagatcagggatgaatatgtggagacgctgagcaagatttacctgtcttactaccgctcttacctggggcggctcatgaaggtgcaggtaaggtcaggagggagaggtattcctgggcacatggactgggaggaggggacatccctgggcaaggaatattttattgtgttgtgggaagagacggttatcagttctcttttctctttccttagtatgaggaagtcgctgagaaagatgatctaatgggtgtggaagatacagcaaagaaagatatcctagtactggggaaccctcatgccaggccttgagagtgggaggactttcgactccagccaccaatgcactgctccttaccttttcctatgggactgaaaccttttagaatgtgatgaaagctatagcctccctccccagaaagatgcacacattattttgacacatagttttgcatatgattgcaagggagggagagacaccctgaagcccattcacagatgtcagcacgtggggccctagtactgggaaagagggctggctaggccacgtctgcctgtctggggtccccacagatagtgagtctttgggcccagttatggtctcattgttttccctgactctgacccatcttacgattcttctcaaagccatcgctccgcagcaggaacaccattttcaccctaggaacccgcggctctgtcatctcccccactgaacttgaggcccccatcctggtgcctcacacagcgcagcgcggagagcagagggtatgaggaggaacaagcttcagtcacgaaagaggctctgagcacggtggggagggaaggccagacctcagggcagagcttcccaacctgcaggccctgtcttaatccccttagacttgggagtggccttctccaatcactccagcctgctgtgatgtgaaaagagctgggaaccattgacttaagggcatgcagaggggagagactggatgaggggaatgacagtcagaggcaggtgttgaggtggatgcaggagtagcaacagcaggtgggtgtaggccctttttgtacccctatgttcccccaccttttcagtgcccattcagcttgctcttagacagcccggacctagatagatgcgaagggtctgcctagctcttattactcaggtttactgattttccagccatatccatgggaagtcagtgttggggtccatcccttctgtttttcttctttactcctcctctcccagtatccatttgaggccctcttccgcagccagcactacgccctcctagacaattcctgccgcgaataccttttcatctgtgaattttttgttgtgtctggcccagctgcacacgacctgttccatgctgtcatgggccgtacactcagcatgaccctggtaagactcctgtttcctgtaccattcaacacctttgtccccagtcttcatcagcagcatagtggggtcatgactctggtagaactgaaatcaggatcgcctcattctaaaatgtctaagccttggctgggcgtggtagtgcacacccataatcccagcactttgggagtccaaggcagtaggattgcctgagctcaggagtttgagaccagcctgggcaacaacctcatctctacaaaaaatgaaaaattagccgggtgtgtgttgatgtgtgcctgtggtcacagctactaaagatgctgaggtggaaggattgcttgagcccaggaggtcaaggctgcagtgagccatgcactccagagtgagacctgtctcaaaaaaaaaaaaaaaaaaaaatagccaggtgcagtggcttacgcctgtaatcccagcactttgggaggctgaggcgggaggatcacaaggtcaggagtttgagaccagcctgaccaacatgatgaaaccctgtctctactaacagtacaaaaattagccaggtgtgcgcggcctgtaatcccagctactcgggaggctgaggcaggaggattgcttgaacctgggaggaggagattgcagtgagccaagattgcgccattgcactccagcctgggtgacagagcgagactccatctcaaaaaaaaaacttgttacttagacttgtcacagtgttactcccccatgaaatcctcagtgcgtagggtccctgagactacccctactgctgacccacaatcaggcaatagcacgtgaaaactgagggtcccccaaatcttggtgctcaaacccctgacccaagctcagccctgaactctgctgtgataggcttgtgatcatagatcctggtgtggccaggtgcagtggcttatgcctgcaatcccagtactttgggagaccaaggcaggaaggttgcttgaggccaggagttcgagaccagcctgggcaatgcggcaagaccttgtctctacaaaaaatttaaaaataaacttaaccaggcatggtggtacacacccatggtcccagttgcttggcaggctgaggtgggaacatcacttgagcccagatgtttgaggctgcagtgaactatgattgtaccattacaatccagcctaggtgacaaaacaacctgtctctaaagccgaaaacaccgggtgcagtggctcacacctgtaatcccagcactttaggaggctgaggtgggcggatcgcctgaggtcaggagttcgagaccagcttgaccaacatgatgaaaccccatctctactaaaatacaaaaattagtcgggcgtggtggcaggcgcctataattccagctactcaggaggctgaggcaggagaattgcttgaacctgggaggcaggcggaggttgcagtgagccgagattgtgccactgcattccagcttgggtggcaagagtgaaactctatctcaaaaaacaaaaaaaaagccaaaaacatagatcctggacaggaaagcagggggcagttccattttacgtctctcccttctgtcctgtccagtgcatcatccccaaagaaacaaatgcgtttgttcatagtcactgaggacaacaaactgacattctcttttaatcctctgtttgttccccaatcacacagaaacacctggattcttatctagctgactgctacgatgccattgctgtttttctctgtatccacattgttctccggttccgtaacattgcagcaaagagggatgttcctgccctggacaggtcactgaattctggtccttgatgcccaacaggccacgaactctcttggtcttgcatgactctgccctgaccttagactcctactgacctggtatcatcaacctttattcccattcatttgctccggaggcagtagtgctgctttttgactcacctttctccaaccactgccccccaacccccacaactagctattgaccattaaactgaatgatgccccactccctcccatccccctccaacattccttgctggctgacctctgattctgattaagcccacaggtactgggaacaggtgcttgccttgctatggccacggtttgaactgatcctggagatgaatgttcagagcgtccgaagcactgacccccagcgcctaggggggttggatactcggccccactatgtgagggagggcaagggtaacaaagggttcttgaaaggcagggctctaagcatcattgtgggggttggccaaggtcacagttgtgtcatgggccacgctatgagcaggtgttctgggagggtggtgaaactcatggtgagtggtgcactgtgggtaggagggactgaaggtagagtcacatcacatggaggtgggttggctaaggaagttgggaggttgtgttggttgggccaggaggtgggtgtgattttccttcccactctctcctagatcacacgccgctatgcagagttctcctccgctcttgtcagtatcaaccagacaattcctaatgaacggaccatgcaattgctgggacagctgcaggtgagggtcggacaggagacacttcccagcagcagggctgcttccagtgggtggagtctgaggaggagccagatggggcccagatgaccttgctttctggtgtcacctcttcctctctgccttttcaggtggaggtggagaattttgtcctccgagtggcagctgagttctcctcaaggaaggagcagcttgtgtttctgatcaacaactatgacatgatgctgggtgtgctgatggtaataggtgctccttctccttgccttcctacccagaaaattcggtttcccccactgctgttagctctgtgagggcagagatgatgcctgtcttgttcagtgttttactcttggagtctggcacagtgtccagcttagtacaataagtgtggaatgaaggggacatcctgaagtgaaggactgctttccccaaactagacatttccctttgtcttcccttaggagcgggctgcagatgacagcaaagaggttgagagcttccagcagctgctcaatgctcggacacaggtaggggtgtggggaaaagggaagagacagccttctgtgctgttttcagctctctctctctctctctctgtgtgtgtgtgtgtgtgtgtgtgtgtgtgtagggagtggcataatggatctcaggtatgcggaattactgtaactcttgattcacaacatactgtcattattggtctattttattttattttgtctttggtttttttttttttttttttttgaggcaaagtgtcactctgtcacccaggctggagtgcagtggcatgaacatggctcactgcagcctcaacagcctgggcttaagtgatccttctaccttagccccctgggtagctgggaccacaggtgcgagccaccatgcctagctaattttttatttttagaatgaattttatttttttctttatctatcctctcaagcatttatcctttgtgttataaacaatccgattacactaagttattttaaaatgtacaattaagttataattgactatagtcaccctgttgtgctgtcaaatagtaggtcttatttattcttcctatttttgtttgtacccattaatcatccccaccttctccccagccttccactagccttcccagcctctggtagccatccttctactctcttcgtacatgagtacatgagttcaattgttttgatttttagattccacgaatcagtgagaacacatgacgtttgtctttctgtgcctggcttatttcacttaatataataatttccaattctatgcatgttgttgcaaatgactgagtctcattcttttttatggctgagtagtactccattgtgtatatatcccacattttctttacccattcatctgttgatggacacttaggttgcttccaaatcttagctattgtgaacaatactgcaacaaacatgggagtgcaaatatctcttcaatgtactgatttcctttcttttgggtatatacccagcagtgggattgctgaatcatatggtagctctacttttagttttttgagcaaccttcaaactgttctccaaagtgtttgtactaatctacattcccaccaacagtgtataagggttcccttttctccacatccttgccagcattgctattgcctgtcttttggataaaagccattctgactggagtgagatgagatctcattgtagttttgatttgtatttctctgataatagtgatggtgagccccttttcatatatgtctgtttgccatttgtattcttttgaaaaatatctattcaaatcttttgcccattttttaataggattattagactgtcatgtagagttgtttgagccccttatatattctggttattaatcccttggcagatgggatgtgcaaatattctttgtctcttcactttattgtttctttagctgtgcagaagctttttttttttttttttttttttttgagatggagttttgttcttgttgtccaggctggagtgcgatggtgcgatctcagctcaccgcaacctccgcctcccaggttcaagcaattttcctgcctcagcctcctgagtagctgtgattacaggcatgtgccaccatgcctggctaattttgtatttttagtagagatggggtttcaccatgttggtcaggctggtctcaaactcctgacctcaggtgatctgcccagctctgtctcccaaagtgctgggattacaggcgtgagccaccgtgcccagctgtgcagaagctttgtaacttgacgtgatcccatttggccatttttgctttggttgcctgtgcttgtggggtatggctcaagaaatttttgcccagacccgtgtcttggagattttccccagtgttttcttgtagtagtttcataatttggtcttagatttaagtctttaatccatttgatttggttttcatatgtggcgagagataggggtatagtttcattcttctgtgtaatggatagccagttttcccagcaccattattgaagagactatctctctttttttttttttcagacggagtcttgctctgtcacctaggctggagtgcagtggtgcagtattggctcactgcaacctctgcctccttggttcaagtgattctcctgcctcagcctcctgaatagttgggattactgatgcctgccaccacgccgggctagtttttgtgtttttagtagagacgggatttcaccatgttagccaggcttgtcttgaactcctgacttcaagtgatcctcccacctgggcctcccaagtgctgggattacaggcgtgagctaccgtgcctgaccaagagactatcttttccccagtgtatgttcttggcacttttaccaaaaatgagtttactgtaggtgtgtgccagctaattttttaattttgtaaagacagttgtctttacaaaagacaactgttgcctgggctggtcttgaattactgccctcaagtgaaaaatcttatgattcttttttttttttaaagacggagtctcactctgactcccacactggagtgcagcgatacgatgtcagctcactgcaacgtccgcctcccaggttaagtgattctcctgcctcagcctctgagtagctgggactgcaggcacgtgccaccatgtccagctaatttttgtatttttagtagagatggggtttcaccatgttggcccagctggtcttaaaactcctgacctcaggtgattcacccgcctcagcctcccaaagtgctgggattataggcatgagtcactgcacccggcctagattctgtttttaatgacactggaaaacaacgaatttttgttttggcatatatatagctttacttttaaaagcaagaacacacacaaaaaaagggggaaaaaagcaagaacacaataaatgcaacatttagatcaacgagtacctgtgcacgagaagcacagggatggtttcagtaggatttcatagtttgatggtgacttttgccaagctgctgctacttggattgtgtggtgtgtttgtgagtgtttatatcattaaaaaacaaaacagccactgcactgggttgttttattttttaatgatataaacactgatgagacaaggcaagaaaacagcaaggcaaaaaagaaaaaaaaaaaagccaggcatggtggtatgcacctgtagttctagctatttgggagacaaaggcgagaggaccactttgaaatccaggagttcgagattacagcgagccatgatcatgacattgtagtctacccttggcaacacagcaagaccctgtctcaaacagcaaaacaaaacaaaaaaccccagaatcacaggatttttttcatgcataatttttctaatattgtcatgttattgcatatggctatagctcattccttttcactgccatatatgacttgtgtgattaaacatattctataaatggattgtttccagtttcttgcttctgtgagcattgttttatgaataatcatgtcttttagcacacatagatattgattatcttcatcaaaagtttctcttgggtataaacctaggacagtagtcttgctgctaataagatatgcagtattagtctttatgagacaatgataaattgttttcctaagtagttccttctcaccagcaatatgtaagaattcctactgagccacattttctccaacatgtggtattatcaggtctttgccattttttttctttttttttttagagaccaaggatgctgctaaagatgctcgggatcagaaatgtttcagattttgatttttttcggattttggattccttgcattatttttactggttagcatctgtagtctgaaaatctgaaatctgaaatgctccaaagagcattacctttgagcatcatgttgatactcaaaaacttccggattttggagcattttggatttcagattattggattagggatactcaacctgtatttcagtgggttttatttgtaattttctgattactaataacattgagcatcatttcaaatgtttagtaactatatgtaggggttcagtcaggctggtgggaaaaatattagtgatgatagccacaaaccctcttggaaggcctaagagtttgcataacttcagtaatagatatggttgaaggcgacctgatctttacctttagttaaataaattagagtaataacaaaggaatgtggggaagttatctaggtagcttgtttactcatatggtcttaagactaatctttgatgtaccgcaggtgcttaactgctttctactcaggaagtccacaatgtcagttaccccgtagtggtgttgactcaagtctttgtcaattaatctttactgaataaatgcgagtctcactagctggtcagggccgccattgcaactgtttacagtactcttcagggagtctgtaaacagcctggacacactcagctggactggcaaagcagagtatctgtgtgtcagtgtacctcattcatccgttgccgggtcaggggtctgcaagggacagactccctgaagctggtgctctgtgtgaggagcgtcaccacaactatacaatttttttttttcctgtaaaatggctgtcatagcatttgaccttttaaaaatcggcttgtggctgggcagggtgtacacctgtaatcccagcactttgggaggctgaggcggatggatcagttgaggccagtaattcaagaccagcctggccagcatggcagaaccctgtctctactagaagtacaaaaattaaccaggcatagtggcgcatgcctgtagtcccagctcctcaggggcgctgaacctgggaggcggaggttgcagtgagccaagattatgccactgcactccagcctcagttacagagcgtgactctctcaaaaaataaagaaaaaaataagtctgctagtattttttatttataagagttctttgcatcatctacatactaatcttgttgattatacgtaggttacagattatcttttagtatgtatctttttacttttttttttttttttggtgagatgagggtctttctgtgttgcccaggctcctgggctcaagaaatccttgcacctttttttttttttttttgagatggagtttcactcatgttgccgaggctggagtgcaatggtgtgatctcagctcactgcacctctgcctcccgggttcaagcacttatcctttctcagcctcctgagtagctgggattacaggcgtgtgctaccacgcccggctaatttttgtatatttagtagagatgggttttgccatgttggccaggccagtcttgaacgcctgacctcaggtgatccatccgcctcagcctcccaaaatgctgggattacaggcatgagccaccgcgtccagcctttgtttttttaatgttgctttttgattaaagaaatttgtaattttaatatgattgaatttatctgtccttcatttttatgtctttgtttttagtaacagtcttgctctgtcacccaagctggaatgcagtagtgtgatcatggctcactgtagcctcaacctcctgggctcaggcaaccctcctccctcagcctcccaagtaactaggactacaggtgtgtgccatatgcccagctaatttttgttgttgttgttgttttgtagagacagagtctcactatgttgcccaggctggtctcaaactcctggcctcaagtgatcctcccgcatcagcctcccaaagtgctgggcttacagccaccatctaccacgcctgactatttttgtcctgtttaagaaattcctgggctgggtgtggtggctcacgcctgtaatcccagtactttgggaggctgaggcgggtggattacgaggtcacgggatcgagaccatcctggccaacatggtgaaacctcgtctctactaaaaatacaaaaaaattagctgggcgtggtgatgcgtacctgtagtcctagctactcatgaggctgaggcaggagaatcacttgaaccagggaggtggaggatgcagtgagccaagatcgtgccactgcactccagactggtgatagagtgagactccgtttaaaaaaaaaaaaaatgaaattccttattactccaaggccagaaaaatattatgctacattttcttcttaatattgtagaattttggccaggtgcagtggctaaagcctgtaatcccagcactttgggaggccaaggcaggaagattgcttgaagccaggagtttgagaccagcctaggcagtatagtgagacctcatctctacaaaaaattaaaaaaatatattagccaagcatagtggcacacacctgtagtctctgctactcaggtagctgaggtgggaggatcacttgagcctgggaggtcgaggctgcagtgagccctgtttgtgctgctgcactccagcctgggcaacagagtgagaccctgtctcaaaaaataataataaaattaaagaataaacaaatatatagagagaatttttttgttacctttaagtctcaaatttacttggaattaatttttgtgtgtgatgtgaggtagggatctatttcttttttttatgtggatggttggcccagaaccatttatagaaaatctttttcttttctttttttttcttttctttttttttttttttagacagagtctcactcttgtcacccaggctggagtgcagggccacaatctcagcgcactgcaacctctgcctcctgggttcaagtgattctcctgcctcagcctcctgagtagctaggattacaggcatgtgccaccacacccagctaatttttgtatttttagtagagatggggtttcaccgtgttggctaggctggtctcgaaaagttttcacattttaaaaagtctttaaggattttgattagaattacattgtctatagactaatttggaagaattgatactttatgatattgaaacttcctatccatgatcatgatcatgggctccctatccttttttttttttttttttttttttttttttttttttttttgagacaggttttgctctgtcactcaggttggagtgcagtggcacaatcatagctcactgcagccttgaattcctgggttcaagtgcttctcttgtctcagcctcccgagtagctaggactagaggcacacagcaccacacttggcttttttttttctgtagagaatacaaaatttaaaaatttaattttttgtagtgtctcactaaactgggattacagatgtgagccactccacctggcctcctcctccaatttttaagagagtcttttaatgtcttttgataacctttttaaattttcagcacaaagacactgtaagtcgtttgccatatttttaggtgggtataatacgtatgtttagttctactaggaataaataaatcttttctagttttttgtctttaacatcttatgtttttgatttcttattctactggctaacactcccaggatgatgtttagaagttgaacagaaaggtgatagtgagaacccttttcatattcctgattttgaaagaattgttgctggtgctgtggctcatgcctgtaatcccagcactttgggatgctgagatgggagaatctcttgagcccaggagtttgagagtttgaggggatctgcctgggcaacatagtgagactccatttcttttttttttttttttttttagacagagtctccctctgtctcccaggctggagtggtgcagtggtgcaatctcagctcactgcaagctccgcctcccgggttcatgccattcttcctgcctcagcctcccgagtagctgagactacaggtgcccagcaccatgcccggtattttttttgtattttgtatttttagtagagacggggggtttcaccatgttagccaggatggtcttgatctgacctcgtcatctgcccgccttggcctcccaaagtgctgggattacaggtgttagccaccatgcccggctaagaccccatttctttaaaaaaaaaaaaaaaaaaaaaaaaaagccaggcgtagtggcatgcatttgtagttctagctgcttgggaggctgaggcgggatcattgcaggagattaaggcacccacaaagatgcacttaaaccagttgtttctgctgagagcagctgggatttgtcactggatttgccaggtatagagactcgccagctgccatcaatgcttctggtcctttttggtcagctgctgcttcatactacgtaggaaagattgttaaagcccagtgcactgtttcctctggtcactcctctgctatcaaggtgttctcttttgcgttatagaaagcttaaagttcatctaagtccagaccagtactcctataggaatataatgcatgccacaaatgtgagccacttaaataattttaaattttctagaagctacattaaaaagtaaggagaaacagatgaaataattttttaaaccactacatccaaaatattattatttcaacatataatcaataaaaaatagtactgaggccagcacggtggctcacacctgtaatcccagcacaggccaaggcagggaggatcgcttgagcccaggagtttgagaccagcctggacaacatggtgaaaccccatctctacaaaaaataaaaaaaaaatgagtgggacatgttggcacatgcctgttagtcccagctactcaggaggctgaggtgggataatcactgagccaggaaagttgaggttgtagtgagctgtgattgtgccactgcactccagcgtgggtgatggagcaagaccctgtttccgaaaaaaaaaaagaaaaaaaagatatacttaaaatttattctaagatgaagtcttcaaaatcaggtgtatatatcatgcttacaacacattatataatttatggctcctgcctagcaggggtcatcactgttagttcaacttttctttggcaagtctactccctgtgccccaccgtacactgctacattattgtttgtatatgtgtgtgtgagactgcatttaggcaactgtaataggttgaatttggttatttaatctctgtccaaaatcacatcacaaagatgccttgattatagaaagatccttccttgcagcatattagttatttgacaccctcagtggatataagtgaatattttgagggaagaatagaaaagatacaatttttatttatttatttatttatttatttactgagacaagttgctgctctgtcgcccaggctggagtgcagtgacatgatcttggctcactacaacctctgcctcccggttcaagtgattcttctgcttcagtctccctgagtagctggggttacaggcatgcaccaccacacctggctaattttagtattaataatttatttttaaatggaataataatttcactttcttcttaccagatctttctgtctgggttgtttgcttttatgagtttttttgtttgaatctcccttttacattaaacaaaaattaacattttattatgggaaatttcactatgctattagaaaagcatagtgaacccccaggcatcatcagtgatattcggtgtatagcagttcacggacagttttgtttcatctataccaacacctattgcttatcctccttctgtgtcccccagttactttgaattaaatcttatacatatacagatgaatattatcacttcatctgtatcagaatgttatttttattaagaaaattatttttgagatagggccttgctgtagtgcccaggctggagtgtagtagcatgatataactccctgcagcctcgaactcctgggctcaagtgatcctcccacctcagcctcctaagtaactgggactacaggtgtgtgccaccacacctggtaacagatggttttaaaaactacaatacattatcacacttaaaaaaattatcttatctaaaataactattcagattttcccagttatttcataagtgatttttttttttttttttttgagacacagtttcactcttgttgcctccaggctggagtgcaatggcccgatcttggcacactccaacatctgcctcccgggttcaagcaattctcctgcctcagtctcctgagtagctgggattatagacacccaccaccacgcccagctaatttttgtatttttagtagagacaggatttcaccatgttggccaggctggtctcaaactcctgacctcaggtgatctacccgcctcagcctcccaaaatgctgggattacaggcatgagccactgtgcctggccttcataaatgatttttatggttcaaatcaggatccatataaagtccatatatgtgtctttttttagtctatagatttcccttccatctcctctgcaatttatttttggaagaaactgagttattgagtcatttgtcatctagaatgatgtacagtttagattttgctgactgcattccatggtgtggccaaacttcctctgtctggtgtatttctcataagtgtgtaattagatggaaaggcttggtcagatttaaattagtttttttttttctacagggatatttgagaggtagtggtatgtatttccatcaggaagcacataatgtcttcttggctctctttgtgatgttagtagccatcaatttcagtgcctagatacattaattagatttctgtatctcctactatctcaaaattttccatcttctgtctgtgctacattctgagtcctttcttcagttataaattctaattcattgtataattcttgttaatctgttgactttctaaaactggcttttcatatctaaaaaaatttccttttttcaagtctgttcattcctcatagttcttactaattggtcatttttacatcctttttttttttttttttttttgagacggagtcttgctctgtcatccaggctggagtgcagtggcatgatctctgctcactgcaacctccgcctcccaagttcaagtgattctcttgcctcagtctcccgagtagctgggattataggcatccaccatcatgcccagctaatttttgtatttttagtagagatggggtttcatcatgttggccaggctggtcttgaactcctgacctcaggtgatctgcccacctcagcctcccaaagtgctgggattacaggcgtgagccactgtgcccggcctatccttaactttagacattgcacacagtacaactgctatccgtatcggatagttcttaaggtcagcagctattgcttattgtgtctgctgactctcttggtagctgcccttcttttgtgtctagtgatctttgagttcattgtttgatcttaaccaggggaactgtatgggccaaaattaggattgaggatatttttctccatagaggattttccttaacttttgcagcagctgaaagatgccattcagatggatctacattagtcatgatgccagaattgggcaaatctgctgacaccaggacacctgtgtatatgtgtttgtgtctttccaggaattcattgaagagttgctgtctcccccttttgggggtttagtggcatttgtgaaggaggctgaggctttgattgagcgtggacaggctgagcgacttcgaggggaagaaggtatgaggaaaatatggtaatgatgggatcagtggtaagggaagtggaaaagaaaaatgaaaggatgcagattacatggtgggggaatagagtatgaaagactggattgagagaataccagaaaagagggtttgatgataaggatggctataccttggggagaacttagtggagttgaagatcagccagatccctctctgacactgtttcctcctgctattagcccgggtaactcagctgatccgtggctttggtagttcctggaaatcatcagtggaatctctgagtcaggatgtaatgcggagtttcaccaacttcagaaatggcaccagtatcattcaggtgacctgcaagtcccaggccccactcagatcccccatcattaattattttccccatctttttgctgggctcagcatcatctaagtgacccttggtcttcagttactagctgtgcccaaagttctgtatgagccctaacctgattcttttttttttgtttgttttgttttttttttgagacagagtctagctctgttgtccaggctggagtgcagtggcacagtctcggctcactgcaacctctgcctcccaggttcaagtgattttcctgcctcagcctcccaagtagctgggattacaggtgcctgccaccacaaccagctaattttcgtatttgtagtagagatggggtttcactgtgttggccaggctggtctcgaattcctgacctcgtgatctgcccgccatggcctcccacagtgctgggattacaagtgtgagccactgcgcctggccgcctaacctgattcttaatcatcactattagcaccattttacggtttgatccctcaatgactttctttgaccagggagcgctgacccagctgatccagctctatcatcgcttccaccgggtgctgtcccagccgcagctccgagccctccctgcccgggctgagctcatcaacattcaccaccttatggtggagctcaagaagcataagcccaacttctgatgtgccagaaaccgccctgagatctgccggtcatctccatggacttctgcaccccattccatacccttcttcacctggggtaccccttccagttttccccttgcttcccaggcccttgacatggcttacctgccttcactcccagcaccttgcccaacaggataagctggatccccttggccttctgaatatcccagtgtcttcaggtttcccaagaccacttccctgtgggcttccaaaatggcctttatcatttctccagtctgtcaccctcctttcctgctcccatacacccaaggcttgtttcttcccctgtaaaaaccactgcctcaatctctggttcactcaactagtcaccatgtcctgaggcatgaagcctcctcagctcttggaattgctggcaaggggtgactgcctctgagtcattgtgtttttcaaagtgatttcttttctgtagctttttgacctaagatctcagcaatttgaacactaacctctcccctcctggctcaagaattactccgaagtcagtctgcagaaaataaatatttagtatgacatgacactta

SEQ ID NO: 23 - DNA, 206179 bp, Homo sapiens
agcggctgacagagcggctgacggagccgggctcaccaggtcgctgccgcgagggagttgctgtgctggggcctgggtggcggctggaggcctgagttgggctcgcggcgggggtcggcagggggccgggtggcggaatgatggaggaggaggaactggagttcgtggaggagctggaagccgtgctgcagctcacgcccgaggtgcagctggccatcgagcaggtaagcgttccgcccctcaggaggggaaacgggagtgcgggaggggagacggcagctccgggcgctggggaggccgcggcgggtggacggagggccgggggctcgcggcagaagggaaagtggaggtggggaggtggtgcgggtgagaagcggtttctgaatcagaaggaaaggaaagagaaccctttctaggctttgattgtctttggcgagggctgggggttctggtggttttggggaaaggaattgtgcgcttagagaggacgacgctaggagaatgcaggccttgggtgccatcctcagattctggggactgtgggggcttcatgcatttaccagactcgtgccaacgccccggttttgcaagctggcacctcgtgagtggcttggaactgggggaagggaatgactttaatttctgaagcggacggcagagaagagagaaagtgttgaaaaatgacatcgttaccattcttaaaaggttgagaattcctaccgttgaatagtttgggtgaggttggagaatactcccaaggggcctcttttcccttcaggaacttttttttttttttttttttgagacggattctcgctctgtcgcccgggctggagtgcaacggcacgatctcggctcactgcgacctccgcctcccgagttcaagcgattctcctgtctcagcctcctgagtagctgtgattacaggcgcacgccaccacacccggctaatttttttttttttttggggtaaagacgggggtttcaccgttttggccaggatggtctcgaactcctgagctcaagtaacccgcccgccttggcctcccaaagtgctgggattacaggcgtgagccaccacgcgcggccctgcctgcaggaactcttgcctttgcaagtttattgagtttttaaggctaatgatattagaaatagtgatttttttcttttctttttttctttttttttgttttctgagacggagtctcgctctttcgcccaggttggagtgtaggggtgccatctcggctcactgcaacctccgcttccaggttcaagtgattctcctgcctcagcctcctgagtagctgggactacaggcaaccgctaccatgcctagctaatttttgtatttttagtagagaccgggtttcaccatgttggccaggctggtcttgaactcctgacctcaggctatccgcccgcctcggcctcccaaagtgctgggattacaggtgtgagccactgcacccggtcagaaatagtgatttctaatactgcagggtattgctcctgataaacggagaaaatctcccttaaaggaattgtcatgaagttatatgatttaagaaagggatttatgattgaggaaatggacaattccattatgccttatttaatgacccctgggaaactttttttttttgagatagggtcttgctctgttgtccaggctggagtacagtggcataatcgtagctcactgcagcctcgaactcctggggctcaagtgataaccctgcctcagcctcccgagtagctgggactacaggtgcattcattgacgcttcgatgtgtgtttttccagtagtggttggattacttatacaaccaactttgtcctagcctgagaacgccaaaccattgggcaggaagcttttagtgttccggccacacggctccaccacttacctccttttgccagaaaaagacataacatttctgttgctctttggactagtgggctctcatggaagaaaagaataatgcagtcagttactgtttggttgacaggtatcagaaaagcacatttttgctatttcttttgtttgtttcaacagcttttggggtacaggtggtttttgattacatggatgaattacatagcggtgaattctgacatttttcctattttgtaagaataagtttgagtgatagtatagcagacatctttatgtcaagcagaattcagacatcattatgtcaagatgaattcagaattttttcttactttagcactctgaatgaaattctgtagtagcatacttgtaaagagtagtgatgtgtgaggagtcaggaagggttgataaaatggaatcacattttactccaagatgaagtcccagagtcattgcataaggtgaaaattggctgggctcggtggctcacacctgtaatcccagcactttgggaggccagggcgggtggatcacgatgtcaggagttcaagaccagcctggccaacatggtgaaaccccgtctctcctaaaaatacaaaaatttagctgggcatggtggcaggtgcccgtaatctcagctactcgggaggttgaggcaaagaactgcttgaacccgggaggcagaggttgcagtgagctgagatggtgccactgccttccagcctgagcgacagagtgagactccatctcgaaaaaaaaaaaaaaaaaaaaggcgaaagtcactctagacatgaaaatcactctgccctgaagttctttaaattgcccatgaaggccgggtgtggaggctcacgcctgtaatcccagcactttgggaggccgaggcgggtggatcacaagttcaggagattgagaccatcctggccaacacggtgaaaccccttctctactaaaaacacaaaaaataagccgggtatggtggcgagcgcctgtagtcccaccttctcaagaggctgagacaggagaatggcatgaacctgggaggtggagcttgtagtgaaccaagatcgcgctactgcactccagcctgggtgacagcgcgagactccgtgtcaaaaaaaaaaaaaaaaattgcccatgaagtaccacgtatgcatctctgataagtctagggctgttagtttttttcctccatcattggaaccagtcattcttttttcagctggcttttgttaggagccttgttacatgaaaacaatttaaaacctaggacagcactaaaacctaggagtcgtgagaggaatacagaaactgagagcaacttgaggaaatagtttgtatctcttgtatcctgctctctgtgggttatactttccctctggtgagcacgtatcattgagactgtgtaaataacctgtgtatatgtgcattatggaaacagcaatgctgaacattttaaaaagaaaacatcttcactttcttctcatccacctcctcttgatgtggtagaaggcttcagcttttctaacagttgtcttgaagatattttgattttttgactctatatttctttggaaggcttcttcagagatgaagttgcttcccacagttgtaactctatcaagctgggtgagacccagtgtccagtggataatttggctgcttgtatcatccaccttgttgcgtgttcttcaggttgttagggagttagctgtatgtcttagaggtggactgtttttgagagaggatctcactctgtcgcccaggctggagttcagtgatagaatctcggctcactgcaacctcaacctcctgggctctggtgatcctcccatctcagcctcccacgtagctgggactatgacaggcatgtgccatggcacccagctaatttttttttgtagagatgtggtttcaccatgttgcccaggccagtctccaactcctgagctcaagcgatccgcgcagccttattttaattaattaattaattaatttaattttgagacagagtcttgctctttcgcccagactggagtgtagtggtgtgatctcggctcactgtaacctccgcctcccgggttcaagcaattctcctgcctcagcctcctgagtagttgggattacaggtgtgcgccaacaccacacccagccaagtttttatttttagtagagacctgacctcaggtgatccatctgctttggcctcccaaagtgctgtgattacaggcatgagccaccgtgcccggccctttccttttaattgacaaattaaaattatatatatttacggtatactacatgtttttatatatactcctctctttctatataggtgtttccaagccaggaccctctagatcgagcagatttcaatgctgttgagtatatcaataccctgttcccaaccgagcaagtaagtagagtttcaggtttccttcctttcagcagcttttggcacatcttgggtgttatgcttcgtgtgttacactagatcatctacgggcccttgatacacaagggagagttaaattcaaatcaaactccatcatcaccagctggggcagtgagctacactgtgttggaatggaattcattgtatagtgaacatattattaataattgtactcttaggttgtgagagtcctcccaaattttctgctgtaaattgaaagtggaaaggatttttataatgtagtagggacaagtgggggtgaggcaggcaggataagcccagaatcataaagccactttcacctctatttcaagatgtaaatttttatttctatttattagtttttttgagacggagttttgctgttgtcgttcaggctggagtgcaatggcgcggtctcggctcactgcaacgtctgcctcctgggttcaggcgattcttctgcctcagcctcctgagtagctggcactataggtacccaccatcacgcctggctaatttttgtgattttagtagagacggggtttcagcatgttggccaggctggtctcaaactcctgacctcgtgatccacctgccttggccccctaaagtgctgggattacaggcgtgagccactgcgcccggcctcaagatacagatttttagacttcacgttttattattttttgtccggtgattttcctgtggagatggattttcttacaaaattggtttttgggtgtttgggtgagaagtagaccagaactggaagtagcagagttgggagaagggcagtgagagtcccgcttcgtttccattttttcagtcagcagttgttcagtaggtgcctgtcatgtgttgtcagtcactgtgctaggtgctgagggtgcagagatgataaggtccagtccatgcccttgaggtgtgcaggatcaagtggtgggagaccctggcgaatgccgtcagtgacagtgggacagtgcggtaaggaaacaaagaccagttcttccaaggaaaatcacaacttcagagaggaggtagcctgtctgccgagcttgagggattcattcatgtattcatttagtaaaacgtagcagtcgtttattaaatgtctgctaagtgtcaggtattatttttagaaactagggagaaatgtaaacatgacaaatctggtcttggtcttatggagtctagtgtagggagaaagacaagaaataaaccaacaaatacactagagatgatcaaacatggtggccgtgataccaggcaggttccgtgacagagcgtgctgcgccgtgataccaggcaggttccgtgacagagcgtgatgcgccgtgataccaggcaggttccgtgacagagcgtgctgcggagggtcctttaaataaaggggcttaacgggaagttctctgtgaggtggttccctctaagctgagacctgatggacaggaaggagtcaagcttgcagcagtctggcagaacagtattctagacagagccagcagctaggtatctcttccaggatgatgagggaaggaaggcgtgggcggaaagaaacccaggtgccgaggcaagagactgaaggcacaacctgttccaatataataaagaaaatagttaaataagtagagttataatagaaataggatatagagatgattgtatatggatattatcaatcattagtctttagtattaatctttgtttcattattacgaccaaggaaaaaccaggccatacagagtcaggagaccagaagacaacagtgagaacctctgtcatgcctggataagggctgcttgaaggcaccttggtcttgcggtagtgccagtgcctgggaaggcacccgttacttagcggactgtgaaagggagtctccctttccctgggggagttagagaacactctgctccaccagctctcgtggggggcctgacattccccaggcctgcccacagtcatccggaggcttcagcatctccctgtggtgctgtgcttcagtggtcatgctcctggtccactttcatgttccacctgtacacctggctcctcctttaagttcttagaagatagcagtagcagaattagtgaaagtgttaaagtctttgatctttctgataagtgcaaagaaaaaatgctgacgtctgctgtcctccctctctgcttcggctaccacaaagggaagggccccctgtcacgtggacatgtgacttgcttgaccttgtcaatcatttgagatgacccacactccttaccctgcctccttgccttgtatacaataaatagcagtgggtccaggcattcggggccactattggactctgtgcattggtggtagtggtgccccgggcccagctgtctttcctactacttcttagtttcgtgtctttctacaatctctcgtctccgcacacgaagagaaaacccacaaggccccgtagggctggaccctacagaaggcccttctaaacacaggaccaaggcacagaaacaggagacataagatgtgcacagtgagcagagactcacaggagatgaggctgaggagggagagcaaggatcctggaggatctctgtcctctaggcttatcgttgccagtttttttggagaccacatgcctttcagtgaaatgctttttttctttcttccttttttttttttttttgaaagagagttttactctgttgcccaggttggagtgcagtggcacaatcacagtaactgtgaactcccgaactctagcgctcccactacatcggccttctgagtagctgcgactacaggcgcatgccaccacacacagctaagttttaaaatttttttagtagagacgagatctcactacgaagcccaggctggtctcgaactcctgagctaatgtgatcctcccgcctcagcctcccaaaatgttgggattacaggcatgagccactgcacctggcccaaatatttttcacagaactgattttctttttttttttttttttttgagacaaagtctcattcttgtcccccaggctggagtgcaatggcatgatctcggctcactgcaacctctgcctcctgggttcaagtgattctcctgtgtcagcctcctgagcagctgggattacaggggcctgccactacgcggctaatttttgtatttttagtagagatggggtttcaccatgttggccaggctggtctcaaattcctgacctcaggtgatccgcccgcctcggcctcccaaagtgctgggatgacaggcgtgagccaccgcgcccgacccacagagctgattttcacttggataatttttaagcctgtatccccagaatattatatacatatgtgagtaccaattttaaatgttaggcttcagtagtatttgctatataaatagaaaataaacatagaggcttcagtgtttgctcctcacaccccagggggcagtgtggcagaccccgtggggacgttcgcaccctgctctggaggttgctgctgtaggcagtgagtattcattgaaggacttttggcaggataatgactggagcacattcacgtttttaaaattccgtctggcagccatgtggaggacgagcaagggatggaggtggggagagactacaggcaggagactcacgcagtagatcactggaaagagatggtgagacctggagaaaagctgtgggatagagagaaccagatctgagagctattgaggggaccaaagtcatgcagtttggtacctgagggcatgaaagtagagggtcatggagaatccaaaattcactcattcgtttattcagttaaaaaaacacccactctacctagctttataagaaatctggggtagagaagtgagcaagacagatatagtctaccaacacagacttcatagtctatcttgatagttaatctcacagtaacagattataggtaaattatgatgttacaatgacttgcttgtgtaattttttttttttttttttgagactgagtctcactctgttgccaggatggaatgcagtagcacaatcccggctcactgcaacctccaactcctgggttcaagcgattctcccgcctcagcctcctgagtagctgagtttacagacacgcgccaccaagcctggctaatttttgtatttttagtagagacggggtttcaccatgttggccaggatggtttcaatctcttgaccttgtgatctgcccaccttgacctcccaaagtgctgggattacaggcgtgagccaccacgcctggcctgacttgctcatataatttttaaatattatttgtcacttgctcttatataacctttactacaactgtaatagtaatctttattagatacttcctgtgtacccgacagcactctaggcactaaacagtgataaactccactttgttatccttcttattttagagtaagaatcacgaggcacggaaagataacactcggcttaaatgtgatagcgttgccatgaaggaagcatgccaaatacagtgacagcagaacccagggccttacttgctcaagatggattgaaaaggcttactcccttgaggaaatggtgttttagctgaatactacaggccaagttaataatttttttttgagatggggtctcactctcttgcccgggctagagtgcagtggcacaatcatagctcactgcaacctcaaattcctggactcaagcactcctcccacttcagcctcctcagtagctagcactacaggtgtgtgccaccacacccagctgagtattattattattttgagatggagtcttgctttgtcaccaggttggggtggggtggtgccatctcggctcactgcaacctcccactccctggttcaagcaattcccctgtcttagcctcccgagtagctgagattataggcacgcgccaccacgcccagccaatttctgtatttttagtagagatggggtttcaccatgttggccaggataggatggtctcgatctcctgacctcatgatccatctgccccagcctcccaaagtgctgggattacaggagtgagccaccgcgcccagccccagctgatttttaattttttttttttttttacagactgggccttgctgtgttgcccaggctggtctggaactcctggcctcaagccaccctcctgcctcagcctctccgagtgctgggattacagatttgagccactgtgcctggccctaagttaagaattttgaactggtttctaggtagccagatttggctgactggatgggtaatggcagctttccactttacccaattactgagtgtaaggagaaagagcaggtttcagtggcaggtagggctggagtgggctgtaaggtgagcccaagtttgaacatactcaggtcatccaggtggaaataagttgttgggtatttgagtgcagagctcttgatccccatcattgtgaatattttggcagatccttccaaactttttttaatggatatactgatttttaaaataaagtttaaaagatgatatactgtgtgattgtcttttttgagatttcacgaaaagcctttatagctcatcattttgtatgaaaggggaattttaggaattagctggagatagacatttgggaatagctaggataaagatagtaattgctgattcaccaaaacaaaaagaagtgttagatttgaaaattttgtaggaaaccaccaggttctcacctcttgtggtgtgtgtgtatgtgctgtatttttttttaaactactgaaaactcaagatctttgttgttccacagattcagttctgtgtcttgtctaattatgccccaggtatatgataatgtacagtcacgtttcttagagtaactcagaacatttatgacacagggttatctttacttctctagtctcagagtttcacttagcaggtcatctgagtgaaatctaagccagattcctgtggatcttaatgaaaaggtagtagaaagtagtggcatagcttgaaatttaactattgtcagatattgggcaaaaaccatctgtatacctcatggacctccagtaaacacttgtacattatgagtttagattgtttaaagtagatttcagtatttccagagtgaatttagtgttactgtgaggaggagggtgagaatatgtttctgttgagtggaagtacttgtgtgtctgcggttgtctggagcctgttgagtggcctggaatggatgcctcttactatttcacccagccaggcctgagaggagcttgggattttccatgcagcagagtgcctgtggggtttaaatagtagccaggtttggtcgcagtggtctagaaaatcgttttagcctcctaatagtaaactgaagataatcatttgaaagtttgattagaggaaactaaatgaaatttatggaaaactaatacaaaactaacataattaggaactttgagaaaagagttatatggggatgtttctaaagagtttctggtgaccccaaaaatgctctggatctgtattgttaagagaaaaaaaaacccaagatccagctcatggctgtattctctaatcccagcactttgggagaccaaggcgggtggatcactgaggcaggaggatcgcttgagcctgggaggtggaagttgcagtcagctgagatcgtgccactgcactgcagcctgggtgacagaatgagatcctgccttaaaaaaaaaaaaaaaagatgccaaattgcttatcatcccagtttatttttgtacagctatacagtttcgtagtagaaggcaatacgcaaaaattctgattgtggtcatactgtcctgggtgtgcagatgactacctattttctgtaattgtcaagaattaccattagaatcaggaaatattttgcaataactaaaacatttaaaaagtaaacaaaactgtacaaccacattataactaaacgagatgagtgattctcaaagcaggataaacccctctgcccagccaatgtggattcccacagggcttttccccaactccaggagaggccctcgaccctggtgaggatcactgccatagccagacactgaactaactgatgagagtgggtgtgtcatagctgtccggtgtcttggggtgcaggaaaattaggtcaagaatcattgcgttagaggtagatgctagagtaagaaagaggatctctgcagcttcaggcaaagcacctgtcctgcagagcacgtttcccatctgttttttatttgaggtgggatctctgcagcttcaggcaaagcacctgtcctgcagagcacgtttcccatctgttttttatttgaggtgggttcccactctgtcacctaggttggaatgcagtggtgtgatctcggctcgctgcaacctctgcctcccaggctcaagcgatcctcccacctcagcctcctgagtagctgggaccacaggtgtgcaccagcaagcccaggtagttttttgtatttttggtagagacagggttttgccaggttgcccagagactggtcttgaactgctgagcttaggaaacccacgtaccttggcctcccaaagtgttgggattacaggcatgagccaccatgcccggcctccgcctccatagttcccaatcttaacgttgaagaggagaaaagtgtgcctcgcctggcagaggggattaagggaaataatttctgtgaagtgcctgcaattgttgcctaggagatccacattaaatgctagcagcctttccctttcccctccagcagaaagcctggaaatgaagggaaaacagtcacccaaaggccacctgactatcaaatagtgtaactttaggatatttctttctcttctatttatttatttattgagacagagtctccttctgttatccaggctggagtgcagtggcgcgatctcggctcaccgcaacctctgcttcctgggttcaagcagttctcctgcctcagcctcccgagtagctgggattacaggcacctgccaccacgcccggctaatttttttttgtatttttagtagagacggggtttcaccatattggcctggctggtctcgaactcctgaccttgtgatccgcccacctcggcctcaaagtgctgggattacaggcatgagccaccgcgcccagcctatttttattttatttttatttattttttctttttgagattgtcacccatcacccaggctacagttcagtggctccatcacagctcactgtgccctggaatttacagactcaatcagtcttctttcctcagcctaataagcagattgtactacaggcgtgtgctaccatacccggctaatttttctatttttttgtagagacggagtttcaccacgttgtccaggttggtctctaactcttgggctctagcagtccacccacctcagcctcccaaaggacagacataagcctccacacccggcctctgttctttttaaaagctacattcattatattataaaaatgatattatagggccgggtgcactgcctcatgcctgtaatcccagtgctttgggaggccaaggcgggagcattgcttgaagccaggaattcaagatcagcttggacagcatagcaagaccctgtgtttataacaaaataataaaattagccaggctcagtgcatgtacctttttgttcctagccactcaggaggctggggtgggaggattgcttgagcccaggagtttgaggttacagtgagctatgattgcaccactgcactccagccttggtgacagagtgagccgccatcttaaaggtaggctatttgatattataaaaatacttgctatcataaaatgatattagaaatgttttcctcttggccaggcgcggtggctcatacctgtaatcctagcactttgggaggccaaggcgggcagatcacgaggtcaagagatcgagaccatcctggccaacgtggtgaaaccccgtctctactaaaaatacaaaaattagctgggcgtggtggcatgtgcctgtaatcccagctactcgggaggctgaggcaggagaatcgcttgaaccagggagtcggaggttgcagtgagccgagatcgcgccattgcactccagcctggtgacagagctagtctccatcacacacaaaaatatatgtatatatataattatatataaattaaagtaatttttctgagattcgtttttctttttttttgagacagggctgtttagcccaggctggagtgcagtggtgcaaacatgacttactgcagcctcgaccttctgggctcaggtgatcctcccacctcagcctcctgagtacctgggactgcaagcacatgccaccatgcctggctaacttttttttattttttggagagatgggatctcactgtattgtctgggctggtcttgaattcctggatttaagtgatcctcccaccttagcctcccaaagtgctgggattacaggcatgagccatcacgtccagcctgagattcatttttacctcaagctgttcttggatttctgaaaattctgagtaactgttggcttggtcagaacagtaggatgagctgtgacaacccagtctgacatctcaaacactcatggcctgtttctcttaccagacctgctcctggaaggcacctggcctcctcctcccatcagaggtagccagaagcaatttataagcatatttcctacaatatccctaattccttctgagataaaatatttgttaagggagagaggaagaggatttattaaattgtattttgaaaacttgaattaaaatagtactataaaattgtacctcctcttgtccattagggggcaccatttcctcacattttctcatctctaaggtcagaagtgatccctttgttttaattgttgttataataagcttattataatcacagtagtagtgcatagtcaataattataaaatacagacaaaaagaagaaaatatttttttttgagacagagttttgctcttgttgcccaggctggagtgcaatggcacattctcagctcactgcaacctctgcctcccgggttcaagcgattctcctgccgcagcctcttgagtagttgggacaacaggtgcccaccaccaagcctgcctaatttttttttttttgtatttttagtagagatggggtttcgccatgacggtctggctggtctcaaactcctgacctcaggtgatccgcctgccttggcctcccaaagtgctgggattacaggcgtgagccactgcacccggcccaagaagaaaaatttgaaatcacttcttttcatattgcaatacgtagttgatagattatagctactaatgctgcaactactaatacattacaattactcctatctatccttccagacttttttctagtggatctatataataaaaaataaatttgtgtatttattgaagtataacataatacagaggagtacacaaatcttaagggtacaacttgatgaagtttcacaaaatgaacatagccatgtaactgccacccagatcaagaaataaaacatttaaaaaaatcttcagaaggcctttccttgcctgttcactgtcactaccttcccccagagataaccactgtcctagcttctaacaggagaattatgttagtgaaatcatatcctctgtccccttgtgtctggctttttctgtgccccattccgttagtaaaatgtttatccatggtgttgtgcattcattcatttttgttgctgtatttcgttacgtgaatttgtcacaatcacgtacaccatgggtcagcagactctcctgtaaaggtccagatagtaaatacttcaggctttgtggctgtacagcgtctttcacgactgcctacctgccatgttagcttaagagcagccgcaggcaatatgtaagtgaacgggcatggctgtgttccagtgaaactttatttacaaaaaacaggggctgggctagatgtggctgtagcttccaactactgctttactttttttttttttaaagcaaaactcatatcatgtgattaaattttttgagatttcataagtagctattatagcacatcattttcctgtgaaagaggaattccaggaagtggactaacagctgggcactcttccttctttattgtagtctctggcgaacatagacgaagtcgtgaacaaaattaggctgaaaataaggtgagtaaagctgtgtgattgttcataattaatgaaaagtatattgttaatttagttaatcacattctggatcacatttttctgtgagagcactgaaatctcaagtttgccatagatggtaatataattccttttaaaatttttattatttatttatttatttttgagacggatttttgctcattgcctaggctggagtgcaatggtgtgatcttggctcactgcaacctccacctcccaggttcaagtgattctcctgccttagcctccctagtagctgggattacaggtgtgagccaccacgcctggcaaattttgtacttttagtagagacggggtttcaccatgttggtcaggctggtctcgaactcctgacctcaagtgatccacctgccttcgcctcccaacgtgctgggatgacaggggtgagccaccgcacccggccatataattattttatccatatgaactttgtggcaaggaactcaatgctttggccagtcttcaattcttcatacaaaaggaaggaagctgtgatagagtctactcaaaacatcttttgtaattatagaaggaggcaaaagcttttctgatagattttttttttctttttttctgtttttttttcaaaacaaggtcttactctgtgtcccaggctggagcgtactggtgcagttacagctcactgcagcctcgaactcctgggctcaagtgatcctcccacctcagcctcctgagtagctgggactacaggcgcaccaccacactttgctaatgtttatattttttgtagagatggggtttcgccttgttggctaggctggtctcaaactgctgagctcaagcaatctgcctgcctcagtctcccacatctactagattttttttttttttttttgagatggagtctggctctgtcacccaggctagagtgcagtggtgtgatcttggcttactgtaatctccacctcccaggttcgagcaattcttgagcctcagccacccaagtagctggaattataggcatgcaccaccatgcccagctaatttttgtgtttttagtagttacagggttacactgtgttggccaggctggtcttgaactcctagcctcaagtgatctgcctgccttggcctcccaaagtgctaggattataggtgtgagccattctgtctgtccttcgactagctttttaatggctttatttccctgtttttgtggatttacctgtttttgtgttcccaaggcttagacatgaagatgggcttatatgtgtatcccttggtcacataacagctaaccatgtcagatctgctggtgggttgggtggtggcccatgattaaacattgtgaaccgtgggggcagaggagctggaagccgtagatctgcctcaggcatggattgcatgatcagggcccggaagcactgattccatctatcactctggctctttccgcctcataaggggaccgagaaagggattgtgtgtgaggtaatttgagttatctggcatgttcacgtaaaggctccggaactttgtcattcctgatgtactccatgaaaaatcctgcagattttattagtcctttcagatagctctgactattaagtgaaaataggcatttttaacaacaaggcgatgcatcagcctgcactgggcttgacttcccgcacggctgtcgctgccctcctcctgcctgatgccactcacacatgtttggttttctggacaattaggtgcagtctgcagaagttgatgaataaattactttttactttttttcttttggtcaacctagaataaagattatttgaatgactgtatccttgaactgttttgctaggagactggatgacaatattcgaactgttgtaagaggtcagacgaacgtggggcaggatggacggcaagtaagtaactcattcctccatattacctatgctcccctggtttctcccggcaaccagatgaccaaaacgtcgatgtgccctcttgcagagcactttccgattgatccgtttcatacatggcaggacaagacagggcaggcgcccacagcagccacgtgctgtccctcagtgtcccttggaccaggaccgtgaactgtggcaccgctcacccgaggccagatgagaacactggggcttccttgtctttctccttcgtgtcgggcatctcttgtgccctcttttattttgtgggctgtggctaaatgaggttgctgcattcgtcagctgagttgttggggttttgatattttgtggctgtaaaagatagtaacctgacatagttaccatttcctcgtacctcgctttgccagcaggcaggtgactcaagattcattaaaaaattttacaagttggccgggcacagcgggcacagcggctcacgcctgtaatcccagctactcaggaggctgaggcatgagagtcacttgaacccaggagccagaggttgcagtgaggcgagattgcaccgctgcactccagcatggacgacaggggtgagactgtctcaaaaaaaaaaaaaaaaaaaagttttataagtcttattggatctagttaaggaggccattggagggaatgaagtaagtcttactggatctagttaaggaggctgttggaggcaatgaagggaaaagtgtgtagggaggagatactctttaataattgaggggccagatgttatctgtgaaccatttccctttttatttgattctgttcttctgttgaggcatcgtatttcagaatggctgttgtagtagaaatgctgagcttgcctttctagccgtcctctcttgccatgtcctgtcctcccttatcagcactaactcaggtcaggactgcttctttgcaattgcttcaatgctgtgatttctcctctttgacattttttaggacagctaatttctaaaaatgttcatcctgctgcccagatttggagtgggaggagcatataatcctacgctgaaatttccagatctctgatatttctgtttccttctgccagttgcttacagatattaggagtctctttcttttacatctgtagttttcccatctgtctatttttactactttatatcactttctttttccatttttccactttatagtcactttccatttgatagccagtttcctttggcctgtttgtgagtagctggccttcttgtcatcatcagaatttgtgtgtagacacattaggttcctaaaactgttctggttttctggactcctgtattttttttagccctcgttacctcgttttgtctgttgaggtatatttcatgaagcatggcttctttggcagatgaggcccatgtaaatgggaccttcagaggggtcctacagagggacagggcagcctcaagcactccagctgcattctgctgcttagctgtcctaatctgtgtttgatcgtattgtctacctcttcagacaccgtatcagctctggccactaaatgaaatccaaggccaggcatggtggcccacacctgcaatcccaacactttgggaggccgaggcggggagatcacttgagcctaggagttcaaggccagcctgggcaacatgacaaaaccctgcatcttcaaaaagtacaaaattagctgggcatggtggtggcctgtgcctgtagtcccagctactgaggaggccgagacaggaagatcagctgagccaggaagttcgaggctgcagtaagccatcatcgcgccactgcactccagcctgggaaacagagtgagaccctgtttaaaaaaaaaaagaaatccaaattcctttgcttggcattcaaaattctggtctccaattccagttttgcctcctcttgtgttctgtctacactgaagactttgtgctctacgagcatgcctgtgctttctggacctgtgcttacagactcttttgtgcttgaaatgcttttcctcctatttctttaagccgccgcatttcccaatcttacccatccaaggaccagctcagatactagtttcttgacgatgttttccatggaccttatctgaatacaccaaggaatcagaattttgaactggaaaggatttgaaactcatctgggcccctcccctcattttacagaggagaaaatggattccagtgtccctcgatgtcctttctccataaatcccacagccccattcttgtacttttcatttggcttttggggtctcccttgacttaccagagaacaagtctcatccctttgatgtttgtaagctcctggaaggtaagaactgtatctttgtcatctttctatttcactacacataggccacatgcaataacattttattcaactgagccaggcacaatggctcatgcctgtaatctcaacactttgggatgcctaggtgggaggatgacttgaggccaggagtttgagaccagcctcggcaacatagcaatacacgtctctacgaaaaggtaaaataattagctgggtgtggtagtacaagcttcagtgagctgtaatggtgccgccgcgctccagcccggatgacagagcgagaccccatccccaaaagcaacagcaaaacccccacaacattttatgcaactgtattgaatattttgtctgtctaagattgtttattaattataaataaacaaaaacattttatcataaaaacatcattttgatcagcaagtgggtgttccttaaaagtgatttagaacttgctttgtgcattaagagtcccaacttgctgctactgggaatagtaacactgcttgttcagtgtgattcagcctacatttggaatggctcactagaagtcttacagtgcaggagtcatagatgtttaaaatttcaagaatgtgaaaatagtgagtgattcatcggcattttttgttgggtcatgctgtgcataatagatgtgtatctttcagttatttacgtttcaacctgtggttctggactcttgcaaactagcggtattacagagtcagacccagaattcgacagtctgcaggaatgtcggcgttctcccccatcccgtattaataggttacaggttgccgcagcagagcaggtcgtatttcacagagcaagaccacattttcaagaatgtttagatagcatttcaatctgtgatggaactttgtattcgtctccttagaatccagacagaaaggaagcccagaagaaataactgcttttcctgtcatggccccatctgtcttttccagcactttgtaatgcaaactgaagtacaagcttttttttttccaaggagctcttgggtcctgtccttgtcaactcctaggtatgaaagccttgctctccagccctggctggctggtttgctaaaaggagtctatttgactgcaacagacttggtggaattacggatgttccaaaatactgagttttgtaggtcaagaggccccacgttcccctcttccctggaagagaagagaagtttgctttcagcactcgcttcctaagcttctgaagaacactcagaagggagtggcatatggacaaaaggaggttttcgttttataaatttaatcttgattgtgtttaaccagaaccgatgtgccgcttttaaatttgtatttattattatcatgttagggacagggtcctgccttgttgctcaggctggagtgcaatcatttttcacggtaaccttgaactcctggggccaagtgatcctcccaccttagcctccgaagtagctaggactacaggcatgtgccaccacacacagctatttttaatttttaattttttatttttggtagagatgggttcttgctgtgttgcccgggctggtcttgaactcctggcctgaagtgatcctcctgccttgggctcccaaaatgctgagattataggcatgagacacttattattacaagtcgtccccacttacctgtgggggatacattccaagacccccagtggatgcctgaaacccagagagtagcaaaccctatatatgccatattttttcctatgtatacatacctgtgataaattttagcatgcaaattaggcacagtaagagattcaccacaataactgaaaataaaatagcacaattatgacagtatgccagcatcactcctcttgtgatttggagctgtatgtaatagccgagatggctgctaggctatacccagcctagatgtgcttcttgcttctttgttttttgttttgtttttgagtcagagtctcgctgtcagccaggctgcagtgcagtggtgtgatctcggcttactgcaacttctgcctcctgggttcaagcgactctcctgcctcagcctcctgagtagctgggattacaggcatgcaccaccacgcctggctaatttttgtatttttagtagagacgggatttcaccatgttggtcaggctggtctcaaactcctgacttcatggtccgcccgcctcggcctcccaaagtgctgggattacaggtgcgcaccaccatgcccagctcatttttgtatttttagtagagacagggtttcaccatgttggtcaggctggtctcaaactcctgaccttgtggtccgcccgcctcggcctcccaaagtgctgggatgacaggcgtgagccaccgcacccggctaggtgtgcttctatatctgtaaataaggggaaagtgttgacttcacattcatggtgtcttaaatgacatttttagcagaaaagttgcttttgaaaagcaatgtttttgactcaaaaattatttgggggtaaggaatgatttaaatattgaaggcataattaggtcatttcttgagcttcttgaagtttctgaaataccagccgcttggttaacattctgctaaacgtttgcagagtctttgttttttgaccaccttctatgtgggccagcttgaactggtctagtctgtgacctcttctaaccagacgatgatgctcttataaagtttatatggcacggaatcctccccatttttatctgttgaaatcatcagtcaaaagctttaattaaatgcccacgtttaaaactttgtggatgagtcaattcaacaagtacatgatgtggtatgctatgaaatttttgcagcttcccaagaattaaaatggatggcttgaacgtaggtgaaagagaggtgaatagaggggcgggttagaggaagaaaaagccggcagtgggaagtttcaagagtggccaacgttgaccggtcgtcagtaagctctcagactcacaggagaggatcagccaccgagtttctgtctcttcaatggagcctggctgcaatgtagccatttctttgatcagaacaagagtaaggtttgggaggagaagagaattattacaagtcgtccccacttacctgtgggggatacattccaagacccccagtggatgcctgaaacccagagagtagcaaaccctatatatgccgtattttttcctatgtatacatacctgtgataaactttagcatgcaaattaggcacagtaagagattcaccacaataactaaaaataaaatagcacaattatgacagtatgccagcatcactcctcttgtgatttggagctgtatgtaatagccgagatggctgctaagtgactaataggtgctgtattcagcatggatatactgggtgaaggaatgattcgtgacctggtcaggacagaattgggtggtgcaagattttatcacactactcagaatggcgcataatttaaaatttactaattgtctgtttctggaattttccatgtaatatttttggaccacagtcaactacaggtggctaaaacctcagaaagtgaactgctgataaggagggggtgctgtattgctcactccttcgctttggaagaaggattaggtaattgtagtacaatcttccacccagttcaggagtcctttgtattacatctctgacgtttcattatcttgcagaagcttggctactttcagtgatggggagcttgctactttgttggtccacaggacagactagttcagttttatagctttagttgtgagaaactcctttcttagactgaactgaaacagtgaaatagacttcattgtaacttcttgttgatcttagttctgccagctggatgggtgtaagcctaatcccttttccttactacagcttctgaaattgaaaatggatattatgttcctaagtgttcccttttctaggctaaccattcttagtttcttcatctttataatgcaatttccagaccctttatcatccttgctcttgatagctgtttgtcagcatccctcttaaaatgtggttcccaggagtggacatgctgtgtcaacatatacactgagacagttgacctctttgttctgggccgagctcattaacttagggactgggggtccagagtgtctgtcaagtccctgaaattaactgtaaatttttgtatgtctagacatatttatgggaggaaaacttattgatttttctagattttctaaggagtctgtgactcttcaaaacttaagggccaccgattttagacactgttcttccattaccttggatttgctgagatttttgattgtagacattgttcttccattaccttggatttgctgagattttttattttagacactattcttccattaccttggatttgctgagatttttggcagccgtattacatggttggcttctactgagttggcagtcacctgaaacccccaggtcaagagtcgcaaacagatgtccgcagagctgggaaagtaacctaagcggcgtaagcaggctggtgtgtgtccacatgcatccaccaggtcctaaggggatagtcacaagtgaattctaatcagctgttgtcacgtctgaacgcagacctggaattgccagatctatcagtttttcaagagcagccggaaatccggattttcatgtaactctcacaatttttaactattggcttagtgtttttcacaaacactgcaaagggcaaacaaaacacatctgtgggccagtactgtcccaggtctttcttcatatgactttcatttaaactttctccacctctgtttgtgcaagagagtctttgaaattgtcagaccgtgtgtgtctcagctttcgtttcatcccactagttctgctcgattgtttatcccatcaagatctttgggagccttgatgacctccccactttatcattagcagatttgccagacatgccttctgtgtcttcattcaagttgtagatgaaaaggcagaatggagtggattcagagccgtgtgacgtgccgtcagaggcttcctgttcttcctcctcacttcagcgcaaagtgccagacccaaaaaacaggatttctacctgtctgtgtgtgtcgtccggggctgtttcttcatcttcccatgtcttgattttcaccaaaaaaggaggctgttaatacttgccttcttcacttttacatagagatatcataaagattatgaactaaagcagcaaagtacattgccttccaaggagaaagtgttccttgcttttcttcctcaaaattagcatattatgcaattcaagcattagaacgaaaataggccgggcttggtagcttacgcctgtaatcccaacactttgggaggcggaggtgggcggatcgcctgagatcaggagtttaagaccagcctggccaacatggggaaacctgggctttactaaaaatacaaaaattagccagatgcagtggtgcgtgcctgtagtcccagctactcacgaggctgaggctggagaatcacttgaacctaggaagtggaggttgcagtgagctgagatggtgccactgcactccagccttggtgacagagtgagactccatctcaaaaaaaaaaaaaaaaaaaaaaaaaaattagtccagcatggtggcacaaacctatagtcttggctactcaggagtttgaggtaggaggattgcgtgagcccaggggtttgaggttacagcagtctatgatggcacctctacactgcagcctggggaccctgtctcaagtgaaaagaacaaaaataactgctctccaagactgacttcccagcatggcattgatcttcattatgtgggattttgaatttgtcattgtcagctcactagaaggagactttatattcttatcctccctcactttaaattgatcctttctctcatcctctcttgggaggaaaatgaagcccattgattgataaaaattgaagaaagtaattggtattagtattaaagggaccacaaatagtttggaaaaaaatggcaattgctacttgcttcttcctactaaaacataccacagctaaagcgactgagcttttagagtatggcctcgaagtttcccattagtggccaagattggctggacattttttgtttcttttctgttattattttttgcgttgtacttttcagcatgtctgcaaataacactaaacttcaggaattgctgaggtttggacatgacctgggagtgccctgaacaccgtgatctgtggggcagccctggagtcgggttgttagatcagccttttgtaggggcagagttttgattcgggctcacagtcatttcccaaccaggatttcttacgtctagtgcagaggtcaaggttggcttgcctttgtcaagttgaatccggtgactgttcattttgcctgcttctagagtgctactggttgtagttgaggcggggcgggcgactgttcattttgcctgcttctagagtgctactggttgtagttgaggcggggactcataaaatgtccgttaactgtttaacaatgtagtgcaactgggtttggcctcactaccattcttcatcctgtttattgcacacaagccttgtgtattagtccgttctcacactgctatgaagaaataccttagacggggtaatttataaaggaaagaggtttaattgactcacatttctgcagggctggggatgcctcaggaaacttacaatcatggtggaaagggaagcaaacccatccttcttcacaaggtggcaggagagaggaagaatgagagctgagcgaagggggaagcctcttacaaaaccatcagatcttgtgagaacttactatcacgtgaatagaatgggagaaaccaccccgtggttcagtgacttcccaccaggtccctcctatgacatgtagggatttgggtggggacacagccaaatcatatcaccttgatagcgcttttttggcagggagacatgtctgcggcatatttggaacactttgccacgtatcctctaaaatccctcatttttagaaaagctataaggaatccaaatagctatcttctctcctctatgtacagtgaaggactgggcattttatttcaattctctaaggattggtgtagttagatatcttcagtgatgtaacattggatggcatcttggtaaagtgaaaaaaacttgagctttgaatttaaattttgtctctgctgttatctgtgtgaccttggacaagatatttaactttccatctgtgacatggagataataatacgtacctcagggttaggggggattagaattaatatactttattttatttatccacttatttatttatttgtttttgagacagggtcttactttgttgcccaggctagagtggagtggtgcaatcacagctcgctgcgccctcaacctcgtgggctcaagtgatcctctcacttcagcgtcccgagtagctgggaccacaggcacatgccaccatgcgcatctttttttttttttttttgagactgagtcttgctctctctccaggctggagtgcattggtgcgatcttggctcactgcagcttctgcctcctgggttcaagcaattcccctgcctcagcctcctgagtagctgggactacaggcatgtgccaccacgcccggctaattttctgtattttagtggagatggggtttccccatgttggccaggatggtctcgatcttctgacctcatgatctgcgtgcctcagcctcccaaagtgctgggattacaggtatgagccaccgcacctggctttttttttttgagctggagtcttgctgtgtcacccaggctggagtgccgtgttacgatctctgctcactgcaacctccgtctcctgggttcaagtgattctccctgcctcagcctcccaagtagctgagattacaggcgaccaccaccacgcctggctagtttttatatttttggtagagacagggtttcaccatgttggccaggctggtcttgaacttctgatctcaggtgatctgcccaccttggcctctcaaagtgctgggattacaggcgtgagccactgcgcccagctaatgtaatttttaagtattgtgtagatgaggtctcgctatgttgcccaggctagtctcaaactcctggcctcaagcaatccttctgcctcagcctcctaaagtgctgggattacaggcatgagccaccacatctggcctagaataaatgtattttaaaacaccttttttgcacaatgttgggctcactcatgtttagtaaatggcaggaacaccagtgctgctgatacacagtccactggaatttcagttttcctagttccgtgcatccaggtatttgtcgagttcctgtggcttttccgtcagctccatcagctcctctccagccccactgctgtgctttaaagcaactccaggtttacttgttctgaattatcccaggccccttactgccttcagcgtgctgttctctgtgaataaaaatggcggcacagcttacctatggtccagaatatctgctgtggcaacagtggtggtcaaaggttcatttctcttgtcctgtcttcaagacctccattagatgtttgcctggcgtgacatgcaatatcaccctatagttaaaataaacattccacttgacaacagaatttattatttgtattgtttttgaaatttgagactgcagatagattttttttcatttctagtttttataacttccaaattcttcttttttttcttcttagagacagggtctcactctgtcattcaggctggaatgtaatggcaggatcgtagctcactctagccttgaactcctgggctcacgtgatccttccacctcagcctcccaagtagctaggactacaggtgcacaccactatgcctgactgttttaaaacactttttgtagagatggaatctcactgtgttgcccaggctggtttagaactcctggcttcaggtgatcctcccacctacgcttcccagagtgctggaattacaggcatgagccactgcaaccagccaattctcttctctctctgtttttttttttagagacagggtctcgctccagggtcatccaggctggagtgtggcgtgcatagctcactgtctcaaactcctggcctcaaacgatcctcccacctcagacttccaagtaggtaggactacaagtgcatgtcaccatgtctggctaattttttaatttaaaaagtttttttttgtagtgatggggtgttcctttattgctctggctggtcttggactccttacctcaagcgatcttcctgcctcagcctcctgagtggctggaattacaggtgcaagccaccacacctgtttccagatttttctcaatcatacacatgcttcttaacttgcaatgaagaataagttcttattctgataaacccatcgtaagttgaaaatatcctaagttgaaaatttattaatacatgtaatttactgaacatcatagcttagcctaccgtgccttaaatttatttgctcagaacacttacattaggctacagtcaggcaaatcatctaacaccgagcctattttatactaaagtgttgaatagctcatgtgatctgttgaatactgtacagaaagtgaaaaacagagtggttgtatgggtacccaaagtatggtttctacagaatgtttctcacctttgcaccatcgtgtagtaagaaaattctgtgttgaaccatcccaagttgagggccgttggtatattattttagaagaaaagtatttttggatgccgtattgtaatgaacagaaggaactgacacctgggtcactgcagggagcctttgctgcctgttcaacaccggtttccagacccaggctcttggaactgcagtcttcccttcctggctctcagactcaaagctgcccgctttctccactccagctgtttgtgttgagtacatctgtctttttgttttctctgtctctcattgcatctctaaagcaaggcagtttttacgccaagatcatcaggacttttacaggtattgggatctgttttcctttattagtctttttttttcctttttttggaaacagaatctagctcttgttgcccaggctggagtgcagtggcgcgatctcggcccacggcaacctccgcctcctaggttcaagtgattctcctgcctcaatctctcgagtcgctgggattacaggcgtgagccaccatgcctggctaattttttgtattctttagtagggacggggtttaattatgttggccaggctggtctcgaactcctgacctcggtgattcactcgcctcggcctcccaaaatgctgggattacaggtgtgagccaccgcgcccggccaacttgttgatttaagaaaagaaaaaaaggaaatctctgggactttgattgggattgcgttgagtctatagatcaattgaaggagaattgacatctttacaatattaaatcttccaatctatgaacatggaatatttcttcatatatttaggtctttagtttctctcaacagtgtgttttagtttttagtatatagatcttgctcatagtttgctagatttatactaaatattttgtggtttttggtatgattataaatggtatctcttaaaatttaaatttccagttgtctcttgctagttgtggaaatgtaattgatttttatttattgaccttatattgtgcagctttgctgaactcacttattagtttcaggaattttttttttgtaggcttttgggatttttaaaaagtagataatcatctcacctatgaataaaatattttttgccttattactctggctaggacctacagtgtgatatggaataaaactggtgaaagtgaatagtttgctttgttcccatgatatagttggatttaaatctagcatcttgcttgttttctgtttgttcttgtacttccttgtcctgggtccacaatatgcatctttatcacagtcatattgtcactgatgtcacagtgatgacattgtatcacttcacatgtaatgtgagagtcttttcatagcaggcttctgacctcttcctcacatcctctctgcattccactctgccccacatcttgtttttacgtattatgaacaccatcactgttgctatttttgctaattagagtaattaaaaataaattttaaaaatatttttattgtttgtcagttttcaagtttctacatttattttatatttttagagatggggtcttgctatgttgcctgagctggcctcaaactccttggctcaagtgatcttcctgcctcagcctcctgagtagccggaggctattggcgtgtgccaccacacccagctattttattttatgtttgaagaagtaaattgtattgtgtatatgtaaggtgtataacatgttataggatacataaagacagtaaaatagcctgcagagaagcaaatgaaggcatttgtcacctcacatagatctcatttttatctccttagatctgagttttttctgtaccatatttgttctgcctcatgaacttcctttagtgtttcttataacacggtctgctggcaagaaatgctctcagcttttctttgcttgaaaagttttaattttgcttttattttttaaaaatatttttgcttggtttaggactctaggttggcagttttgttgttttatttttttttagtactttaaaaatgtcagtctttgtcttctagcttgcattgtttctgagaagtcaacccttattcctcttgggatctcagcacttcttggatcagtggtttaatgcctttcacttaaaaaaaaattctcagccattatctcttcaaatgtttctgttgtgttctctcttcctcctagaattctacttacatgtgttttagaacatttaatactgtcctgcaggtgttggattttcttttcttttttcctctttgtgtttcagtttgggtactttctattgacccaccttaaagttcaccaatcctttttttgctgtgtcgagtgtgatgaggctgttgaaggaattcttcagctctgacaccatgtccttttttctagcatttccatttgactcttataatttcctgctctctgctgcaattcttcatctgttcgtgcaggtaaaacaccttttctaccagattctttagcatattattcattgttattttaaaatcccctcctctgtagcctatctaatatttataccaaatggctcctctttgagacaggttctgttggttgctttgtctcttaacaatgggtgcttttcctttcttccctttcttcttttttttcttttttggcgtatatatgtcttaaaattttttattgaatgccaggcattttgtgtagaagaggagagagtgcccccattttttcctcatgaacacccagtgaaggtcttggaaaagagcctgagagtgggtgcaaacccacctgtgcttacactttccaggcctccctaccattgcgccagcccacacttggcctttagtaacttgttaaaaactttccttcagccctctcgcctgcttgtgtggcacccccgtcttccttacatgcccttctacatggagacggttctcctgtcctgtctttcctgggggagcaccttccttcttggatttcaggatgcttggttacctttagctctctgctaggttcaagaaaagttgtggttttcagtttccgttttcctccttgttagtgtaagagcagcactctttctgctttctgcatcctcggcagaagcacagctgatcagcgggtttcatgcagcatatagtatggcaagttcattaattcaatttcaaatcccacactgcagctaatcctcaagaatctaccactttttgagttttagtgtagtttaaaaaaggcttatcaccaagtacctgaaaagggctgctgtgtttaaagtgttctgttctatgaattgcagctgaatagactaagaaatgggtattaaaatatttcttccttttctaattacatatatctatgtgaagccagattttcttcatattttcaaccaaaacagcatgtcacagcacaggaatgttggtatctcccacgattcctatgctggaacttaatccctattgtgacaggatttaaaagcagggcctttgggaggtgactgagtcacaaggggtctgccctcatctgtgagatcagtgtcctcataaaagacttttgaaggatggccatttgcccctttccccatgtgaggacacatagaagatgccgtctgtgaggaaagggccctcactgggcaccagatctcctggtgcctccatcttggactttccagcttccaggactgttaacaatttctgttgtttagaaattacccagtttaaagtatttggttatattaatagcagcctaaatagacaaagagttgggtattaaagtatttcttccttttctaactacatatatctatgtgaagccagattttcttcatattttcaaccagaacaacagatcacaacagattcaatatggaagcgtgtatgggagtccagctggtgtttatcagagcagacactaaagatttttgcagagacaccccagcagtgccacgcttctcaagaaatttgttttgtaggccgggcgcagtggctcacgcctggaatcccagcacttggggaggctgaggcaggcagatcacgaggtcaggagttcgagaccaccctgaccaatatggtgaaaccatgtctctactaaaaatacaaaagttagctgagtgtggtggcatgcacctgtaggcccagctactcgggaggctgaggcagaagaataacttgaacccaggaggctgaggttgcggtgagccgaaattgcaccactgcactccagcctgggcaacagagcaatattccctctcaaaacagaaaacaaaaaacaaacaaacaaaaaaacaactttgttttgtctggggggaaaatatagttatttttcaaaaaacatgtaatttatgctaacatgtaatatatttatcattgtcatgtttaaatggattaacagatacatattttttatttaaactcctcagttttaatctccaacattggtatatgtcagtagatataacctacataaaccctttcaataaatttccaagggtataaagagattctgaggtcaaaaagttttagaaatgctctttaggatcagctaagagtgggaatggcaggcagtttgttcttgattttaatgacaggcactttacatagtgtatctgttcatttgctcactcagtacatatttagtgagtgccttctgtgtggttggcactattttaagcattgagaattacacaatgaaaaaagcaaaagacacttctctcccggagctgacaccaagtgtaatgttgtcttgtttcccgattcttttgactgttaaggagagatcttcacaatcttggtcactaagcacttttgccagaaaatagacgttggattttatcatatgccctctcagcatgtactgaatatagtcataggggttttttcatgttgttgatttgtttaagtttttttttccttctttttaaaatatttaacctttcataaatgcttgctgggtcatcgtgtattgtcttttaaatatattgttgaatcctagtatttttatctgggattttgattcatgttaaaaaatgaaattagtttgacattttcttctttttggttatcattgttagattttgtatcgggtttatgtcagtttttgttgttgttattttgagacggaatctcgctttgtcacccaggctggagtgcagtagtgcgatcttgactcactgcaacctctgcctcctgggttcaagcgattctcctgcctcagcctcccgagtagctgggataacagacgcctgctaccatgaccggctaatttttgtatttgtagtagagatggggtttcaccatgttggccagattggtcttgaactcctgacctgaaatgattcacccacttcggcctcccaaagtgctgggattacaggcgtgagccaccgcgcccagccatgcccagctaaatttttgtatttttagtagagacggggtttcaccatgttggccaggctggtctcgaactcctgacctcaggtgatccacctgcctcggcctcccaaagtgctgggattacaggtgtgagccaccatgcctgacctttgtcagctttataaaacaaactgggatgcttcccattttttgcaaccgcagagaccatttaaatagtaaactgtttcagagagtcagactatagataatataccctgaagtccctgaagtctttgaaacaattgacccattatcaaggtcaagtgccttttgggagattggtttcttggcagccttttctgttatttctgtggttatagttacatcttccacttcttgagttgattttagtaagtccttgttcttgaaaataattttactcagatgtttaagtttattcatcctttccaattctctgtttatattctctttccattctttttgttttgttttggttttttgagacggagtcttgctctgttgctcaggctggagtgcagtggcgcaatctcggctcactgcaagctccgcctcctgggttcaagcgattctcccgcctcagcctcccaagtagctgggactacaggtggccgccaccacgcctggctaatttttgtatttttagtagagatggggtttcaccgtgttggccaggatggtctcaatctcctgacctcgtgatctgcgcgcctcggcctcccaatgtgctgggatgacaggtgtgagccaccgcatctggcctctcttttcattcttaattttatgttttctctttcccacacccccaatcctagattaaaacagccagaatttctttaggccttctcagaggacttgcacttggatatatttgtcagttctcctcttttcctgtttcagttcattactctgtacctttatattttactgctttcatctctgttgtctttatgctccttctacttcttgttatgtaagaagagcgcttaaaggtacggcttttctctgaatgccactttggccacatctcctgagtgttaaaaatgaatttttaatggcgggggcgcggtggctcacgcctgtcatcccggcactttgggaggccgaggcgggcagatcacgaggtcaggagatcgagaccatcctggctaacacggtgaaaccccgtctctactaaaaatacaaaaaaattagccaggcgtgatggcgggcgcctgtagtcccagctacttgggaggctgaggcaggagaatggcgtgaacccggggggtggagcttgcagtgagccgagatcatgccactgcactctacctgggcgacagagcgagactctgtctcaaaaaaatatatatatatatatatttagccaggagtggtggcacatgcctgtaatcccagctacccgggaagctgagacaggagaatcgctggagcccaggaggcagaggttgtagtgagccgagatcgtgccactgcactccagcctaggcgacagagcgagactctgtatcaaaaaaaataaaaaagaatttttattgtttttatttttatgggttttttgtttttgttattttgagacagagtctcactctgtcacccagtctggagtgcagtggcttgatcttggctcactgcagtctccacctcccgggttcaagcgattctcctgcctcagcctcccaagaagctgggactacaggtgcccgccaccatgtccagctaatttttttgtatttttagtagagatagggttttgctatgttggccaggctagtctgaaactcctgacctcaggcagtccgcctgcctcatttgacctctcaaagtgctgggacttcaggcgtgagccaccgggcctggctttttttctctcttgagacagggtctggctgtgtcacctcggcttcagtgcagtgataaaatcatggctcactgcagcctcgacctcccaggctcaagtaatcctcccacctcagcctcctgagtagctgggactacaggcactcgccaccacgcctggctaattttttttgtatttctcgtggaatccgggttttgctgtgttgcccagactggtcttgaactcatgggttcaagcgacctcctgcctcagccttttaaatgttgggattacaggtgtgagccaccacacctggcctggttttttttcttggcaagtagcttggtgtaattgatgatgcttttaaaaattttattaaatttcattttagtaaatataacctttttcaattttttatatggctatattttaacagcattagtgagctataattcacatataattcatctatttaaagtatactgttcagtggtttttgatattacattattttttaaaccttgtaaaatatgtatataatatagaatttattattttaacatttttaagtgtataattagtggtattaattacattcataatgtacaaccaccactaccactatttctgaaatttattcatcaccccaaatagaaactctgtaaacattaaaaccattaagtccttccttcccctgcccactttcctcaacttcttgtaacctctattttactttctgtctctatgaatttgcctattctgggaactttatattaatataagtggaattctacaatatttgaccctttgtatctggtgtatttcacttctgtggtcttcaggattcatccacgttgtagcatgtatcagcactttcttctcttttacgggtgaataatattccgtggtgtagttccaccacattgtgtgtatccattcatctgtccatggacacttggattgtttccaccatttggcttttgtgaacagtgatgctatgaatattggcatacaaatacctgtttgagtttctgcttccgtcccttatgctgtgtacctaggagtggaattgctgggtcacatggtaatttttaatcattgcaatatttaatctctttagaaacatttttccatattgttctgaactttcatagattcattctttccatagactcaggtgcattaacacaagcgttctgttttgtcttcatttaattaatatagacaacatgtttctgattagcaagaatcttaagcttttgtatgtagtgcctactcatggagatgttctctcccacaaaaaaaaaaaaccaccctgattttttcttttatttagttaactagtccagcagttggactgtttccttcctgaccttagaaacgccaagtcccgcttttctgcaacatgattattgaaaatagttttaggaaaatactgcgccaagaaagaacactgaagtttattgttcttctgagccatctccatataaattggcaggttcttctgagccatctccatataaactggcagtcttcaggagccaagaaagaaggtcaagcgtaactcaccatctgcttatttccatgttagaggcagtcacaagtttaaactagactctgcgtctcaagaggaaaatgccattcatcaccactgtaactgctctggctagtacccaggtcactcttgcttttgattgctagtagttagaaatcgtgtaaggaaaattccatcctcagtttgaggctgtgcattagaaaaattgcggaattactgccaacagagcaaagccttctggatttcaggtccttgatacaagaagtcactgagatatgtttgtacaatggatgggaatttggctttctgtcttcatggaagaacttggcctcctttttcctcttccctctttcatccacggaaacagtatttagaagagcacagattcagcgttgtggttgtgccgtcaccatttccatgtgtaagtctccattttcaagagtctgtaactataaaatttcctttgctccaatttggactccagggtctcctctggaaggagattagttttgcaaaaccaaagataatacatctgttttggcttggcgttttgtagtcatctagattaaagctctaaaatacatcagaaacttgtcgtcctccgtatattattggatcccatgccggggtttctaatttctgtttctgtattgcatcgtagactctgaacagatgctgtgttcgtttctaggtattgtatgtgatacctggaatatggatgttaggcaaaaatgtattagtgccactttcataatgacccccaatttggaggggggcatttcttctggagatatacttactaccaagtaagttttttttttttttttttttttgagatgggagtctcgccctgtcgcccaggatggaggtgtgatctcagctcactgcaacctccgcctcctgggttcaagtgattctcctgcctcagcctcctgagtagctgagattacaggtgcctgccaccacacccggctaatttttgtattttcggtagagacgggttttcaccaggttggccaggctggtctcgaacacccaacctgaggtgatccgcccgcctctgcctcccaaagtgttgtgattacaggcgtgagccactgcacctggccccaagtaagtttgatgattcaaattctgtctttaaagcaggagaaaaggtgtatttgaggggtctttaccccatctcagaccgaattcttaactcctgtctccttgttgtacttgagcttttcttgttcctagtcacaagggaacggtcgcgacagacagccctctcctacttccgtgataaccgtagaattatcagctaggcaaagtgctacttctaataagtcagaaatttaaacttttttttcattgaagacttagagattctagtctttagagatttctggtaactagtgtcttgtgggcaggttctaggaccgtttgtcagccctggaattttccagatctctgtaattaaggatgtactgttttaaggctgatctgttcttgattcattcactgtaagcaaagacacattttcagttgcttttgcagaacataacattttgagtcatttgtcttgatctgtaatgctaatgttttattacactataaatgtttaccttgcaaaatattgttgcatatattactttacttgatttactcgattcacatgtttacaaagatgtgtgaattaggccacgtagatgctgttctccccattttacagatgaagagatggcccgcatcagttctgtgacgtgcccaaaatcacacgaagcgagttaatcacagacccagattttctcattcgcagtatgctgcatacttgtccatactaaattatctttaaacagtgacaaacatttaaaagcagatttgggagccacctgttttgctgtggagcctggaaggctgattcataaggaatttcaaataatggcagtgaccatggcctcattagccagcttggtccccctcagtatgacgaagaaactggactgagagaagaaccccaggttgaagagaactctctgtgttctgcacacctgtgctgccgaaaatacagacaccagtgaggccctaaagagagtaagcgaaccaggaagagaaaaaaatcacacagatgaatcctcgcagcctgaagggcatttggcacagaaggtgtctcaaaaagtcagctgagggaacatccagatgtcacgcaaaaggatgttttctcctgaatgaagacttacgatatagatgagagttatgaagtgactaaaatgagaagtaatagtaagatatggggaattagaatgaagtcaataacctcgaacttggcaactggaagtcctggctatttgggaaaagtagtcctttgttaaacttggacaagttgttccttttaatgtgccccatttccaaaaatattgaatttctttacctttcattcagcaaaagcagcagaaacttttgcttaaacgtttccttgtcttttgccacttggaggtgttgcttgaaatgctctcatcctccggggttacctttcgtcaaaggaagctgcatgaacgcatccgtcactcgcagctatttcagggctagcttgttttaagttaggggtgataacagatataggcagaactttgcaatgtaaatgtttagtcttatttgggcactgctgaatttgtttccgagcctcgtcttgtgattttaatttctggcttgtctcctgaaaacaacaaaaatgagctctttggttcacattttcagtggctttggtttgcagaaatcataaataaaagtaacttacatggaacagaacattttaacaaacaaggtgagaattactccgtttgctctttacagtcctttggtttttggttcacaaacttggaaagaaatctgtgctttaaataaagccttcttatactccaggttcctaagtggtgtggaggaatttgtgtaaacatcagtgattctcatctgatgggcgccatctggcatttgaccagggcagtcctggttgagttctcggacacgtagggaagcaaagagctgtagacgtgcagccatctgtggctgtgagagtccgacagcctctgctgctgttgagcaccatcatggggagtgggctgcgttgttggcattgctgaggctgggtgtgtgagagtcccgcagcctctgctgctgttgagcaccgtcgtggagagcgggctgcattgttagcattgctgaggctggctgaagcacctctgtttcagctggggatacctcgtttccatagcaacagctctcagtgatgccggggtggtcagcagtaacaaaagaagagactttctctaaagagaggcgacttgacccttggtgtccaccctcagtggatgtggtgagggcttccgtgtagggcttatcagatgtggtagcactcatccatgtttctgctctctggaggacctcctggctttcgaaatgatgctgccgttgttttttttttgtttttgtttttgttttttttttgcgacggaatcttgctctgtgccccaggctggagtgcagtggcacaatctcggctcactgcaagctccacctcctgggttcacgccattctcctgcctaagtctcccgagtagctgggactacaggcgcccgccaccacgcccggttaattttttgtatttttagtagagacggggtttcaccgtgttcgccaggatggtctcgatctcctgacctcgtgatccaccttcctcagcctcccacagtgctgggattacaggcgtgagccactgcgcccggccgctgccattctttattcatcgctctttgtatcattttgtgtataattcagacatgtattccttacaagccctttaaagatacattccctagctagtgatctttttctctcagtatctagcacagtacatgtaataggcactcactttttaattgaatgaatgaacaaaagacttcaatttttttctggagaatgtctcattttcagcatggttcaaagattccatcctcttaatccatgagccgttcttctgagtctgcctgcagatactgaacttagccatcttatttacaaagctctaaaagatgagtaacaacctctgattcttagagggtagtctcatctgaaatatcctactccatctaggagatgtgggaatactaatagttgccattaagtgagcactttctgtgagctgagtgctttataaactcattcaagactctcttggttgcagaagacaaaaatcccaattcaaacgggcttaggcaaaagggggattatttggaaggatcctgttgtgtctcgtttgaagaagttcaacaagtgtgaccgccagaaggatagcgtctcagctgggcttgtcaaacagctgaagccaaagacgggagtaaagctcagagagagagagagagagagagagagagagagagagattgagattgtgtgagagagagattgtgtgtgtgtgtgtgtgtgtgtgtgtgtgtgtgtgtgtgtgtcaccctcatcatctctacctgtagtccagcctcctgcccttcctggggaacctagctgctctctaactcagtttcacttcttgggactcctaccacccgcgaaagacaaactctttttcccaattctcattctggtggctcacgcctgtaatcccagcatgttgggaggccgaggtaagcgggtcatgaggtcaggagatggagaccgtcctggccaacatggtgaaaccccgtctctactaaaaatacaaaaattagctgggtgtggtggcgggtgcctgtaatcccagctactcaggaggctgaggcatgagaatcacttgaacccaggaggcggatgttgcagtgagctgagatcatgccacgacgaagcgtgactctgtctcaaaaaaaaaaaaaaaaagtcatgggaaaactgctccaacgagggcctggtcagctcttggacagcagactctgtagaaacacggtgaaaggaagatttcgcatgcggaggggaagagtgttgggtaaacgattccaaacatattttctactctcacattccttactacctttcaggtagctgatagaatttgcattctggaaattatgaaactacttcctagaggataagaggcttgacagaaatcacacagtaactggcagagccaaggtttgaatcccagtctgctagttgaaaatcccttgcttgtaactcatacagcatgttgctccctccctccctccctctttctcttttctttcttttctttctttctttcctctttctttcctgtctctcttttctttttttctttttccttcctccctcccttccttccttctttttgtcccttcccttcccttttccttttcctttcttctttcttttcttttctttctccgtctcactctgttgcccaggctggagtgcagtggcataatcttggctcactgcaacctccacctcctaggtgcaggcgattctcctgcctcatcctccccagtagctgggattacaggtgtgtaccatgatggctggctagtttttgtatttttagaagagacggggtttcaccatgttggctaggctggtctctaactcctgaccttaggtgatttgcctgcctcggcctccgaaagtgctgggattacaggcgtgagccactgcacctggcccagcacgttgcttttccatataatagaaaagggaaccagcagatagatgtcaagttggaaaacagaaatggtagcaaaatagtggaaaaatctaattttctccccagtaaccgtgaataatagcaccttattttttcacagaatagtctaaagccataccagctcttcggaaaatgaacaacctttcctccttcctgcagtggccacaaaggggatctcggtttaaaatctctgaaaggctgcctgcggactcacaggataaaggcagcatcattctctgatggcgcagactgcaaaattagatggacctgagagccagagggatgctcatttcttaaggcactgccaatgaatcagagcccctctgtctactaacgtggcagacaacagttctgcaaaaaaaggaaaaagagaaagaagaaagcaggagagtctgtgccaggttccatactccttatcttccacacgtgacctcctgtggctttgagagcctgctcaccgtctcctccaggaggcaaggagaattcagagtagtggttaccattaggatgcacagaaatacaaagatgctggaattggttttgctgagccttctaggctaattcagtgggttgcttttcatctcctgtttacagaatttgagtcttaaaagaggagcacggcagtcaccgctttataacaccgtcagatacaggctgtggctccagtgcccagttcaccagtgcccagttcaccagtgcccagttcaccagtgcccagttcagaaactccagtaggggcagattaaacacagtcgccgctttataacactttaggatgcaggctgtgtgtgtatagaatttgagtcctaaaaagggccacaacagtcactgctttataacacctttagacgtaagctgtagctccagtgctccgttcagaaactctagtggggtagattaaatgcagacatttttgggagtgattagttctgtttttaatccacatacagcttggaatggaaagtagccaccttttaatttttttattattacttttttttcttctttttttttttttagatggagtctcgctctgtcaccaggctggagtgcgatggcaccatctcagctcactgcaacctccgactccctggttcaagtgattctcctgcctcagcctcccgagtagctgggattacaggcatgcgccaccacacccagctaatttttgtatttttagtagagatggggtttcaccatgttgggcaggatggtcttgatctcttgacctcatgatccacctgcctcagcctcccaaagtgctgggattacaggcatgagccatcgcacctggcctaattttttttttttttttaagacagagtatgtctctgtcacccaggctggagtgcagtggcgcaatcttggctcactgcagcctccgcctcctgggctcaagtgattctcatgcctcagcctccggagtagctggaactataggcatgtactagcacacacagctaatttttttagtatttttagtagagacggagtttcgtcatgttggtcagactggtcttgaactcctggcctcaagtaatccaccgtcagccttgcagcgtgctgggattataggtgtgagctactgcccccccggccaaccacgtttttattttaaaaagtgtctagggacagtgccagagtgattctttcagcacatttctgattagccaggtagtgaaggtatttttgtgtttcttaaaaaaaccttaacttcttgtaggacccatgattcttccagttgcaaaacaatctttctatatgactcatgatcagaggttagatgtcaaatattagggtgtgtgttgagaatggacttgcctgatagcaccagtgcttcagaggagtttttaaactctgcaaaatgaattatagtacatttccccaacttcagtaccttattaaaacaagcaaaagtattccagcccgaaaaaagtctggcacatagtttatctatcttggagactgtgacatgtaagattgtgtgagtcttatttgtttgctggaagaaaaaagcgataccttcagcagagacagttctggtaggatgccaggtttaatgtaagagagaaagggatagaaaccctttctctgagataggatcatgcagacttcttcatatgtgagacctaagtgtataacttagccccttttttgcctttcttagctgcatgtcatatgttttagggtgtttgtctagaacacagtagctatggtcccattagcatgtcaccataacatgacatgacctgcagtatcacagaattccatgtgagctgtgtcgaaaaagatcagtcctttctagtggtcagttgcctacagaggcctctgttgcactttttactccacgattgaaacttttttagaatttactgatcccatgtagcatcttggatattagactctgtttaagccaaatagagaatacttacagaaagcatgaagctgtgattttgaaccactgctcatggttgggcctgaagttagaggaatggttatgagcgcacttattcagagcggtagcctcagcaccagcactcttacaggtgcaccatgatacttttaatcagtgggcaatatttgtcaaggtcccactgtgccatagccttgcttaggtgctgtaggtgaggtgaccatatgatttatcaccagagtcactttgagaaggagagggagctgttaataactatactgaatcataaacgcagcgtgtccccggtaaaccaaatggatgattggctcagctatgggctctataggagtgctgttcatatccttggtccccattctaaaggatacttataaccctgctaaagggctaatactcatacactaaaccagtggtccccaacctttttggcaccagcgagcagttttttggaagacagtttttccatggaccagggagggggacatggtttcaggatgaaactgttccacctcagataatcaggccttagttagattctgttaaggagcttgcaacctagatccctcgcgtgtgcagttcacagtagggttcgcgctcctatgagaatctaataccgctgctgatctgaggagggggagctcagaagatcatgctcactcacttgcccaccgctcacctcctgctgtgcggcccagttcccaacaggccacggactggtgctggcccacggcccagggcttggggtcccctgcactaaacaattcaagaacattatgtttaaaaaagtcctcttctgtaattaacccattgcccccccccccagaacattatgtttaaaacagtcctcttctgtaattaacccattgccccctccgcagaacattatgtttaaaacagtcctcttctgtaattaacccattgccccccccagaacattatgtttaaaacagtcctcttctgtaattaacccattgccccccccagaacattatgtttaaaacagtcctcttctgtaattaacccattgcccccccaaataaatttctctcctgctaaatcactcccaagcagacgtatgcaagcatttctcatctttaaaaattactccctttacgccatcttttgccctatttttcttcctttctcatagcaaaaacttcttgaaaaaaaaagtctataccagggtcagcaagctttctgttaagggctggatagtaaatattttagcctttactgaccatatggtctctgttgtaactatttatctctgccattgtgtggcaaaagtccccataaacaatacttaaacaaatgagtttggtttaagtattattaatgagtttcggtccaaaaacacattgtttacaaaaacaggtggcagacgtggcagactggcttcagcccacaggccatcatttgtggcctgctctgtgatcacagcctctacttcatgtcatcgctgtccattcccttgactgcattgagactgctcttgtcaaggtcaccaacaacttccctgttgtcaaaatcagtagcagctgtcttcatttttttttttgagatggagtcttgctctgtcgcctaggctggagtgcaatggcaccatcttggctcactgcagcttccgtttcctgggttcaagcaattctcctacctcagcctcctgagtagctgggattacaggtgcacaccaccatgcctggctaatttttgtatttttagtagagacaggggtttcaccatgttggtcaggctggtcacaaactcttgacctcatgatccacatgagttttttgttgttgttgttgttttgagatggagttttgctcttgttgcccaggctggagtgcagtggcacgatcttggctcactgcaacctctgcctcctgggttcacgcgattatcctgtctcagcctcctgagtagctgggattacaggcgcctgccaccacgcccggctaatttttgtattttgagtagagacagggtttcatcatattggtcaggctggtcttgaactcctgacctcaggtcatccacccgccctggcctcccaaagtgctgggattataggcctgagccactgcgcccagcctcttacatgagtgtttaacaacagaaggcacaatcactctttccttctccttcaaacacttctgtttggcttctgtaacacccatcgtccctgattttttctcatgtcactggtggtttttctctgcatctctgcttttttttattttagacttctgaatattggcatgcccaagggtcagccctgtgccatcttttcttctcttgtgtattctgtcttcctaggtgacttctaatcttacagacttacatatcatctctaaagtaatgacttctgaatttaaatcccaacctatcacctctcttccaagctccagaatcttatgtccaacttaatgtctctacttgatctcaagtaagctatctttttttttggtcgggacagagttttgctcttattacccaggttggagtgcagtggtgctatctcagctcactgcaacctccgcctcctgggtttaagtgattctcctgcctcagcctcccgagtagctgggatgacaggtgcccgccaccacgcccatctaatttttgtatttttagtagagacggggtttcaccatgttggccaggctgtcttgaactcttgacctcaggcgatccgcccgcctcaggctcccaaagtactgggatgacaggcgtgagccaccatgcccagcttactgtctgtatttctaccaacactccggtcacaaccatgaagtaatttctaagaagttccagactttctctacatttctgcttttcttctgagcccttagcagaatcccccttagcactctgttcacagcaatacaggctttttccagccttcacttcaagactgttccacatctgtccatcacccagctccaaagccatgttttcaggtatttactatagcagtagcccacttcttgataccagttttcttagtctgttttatgttactgtaacagaatagtacagactgaatcatttataaagaaaagagatttcttataattctggaggctgggaagtccaaggtcaaggggcccacatcaggcaagggcttcttaccgcatcttcccgcggcgagggctttctcactgcgtcgtcccgcggcgagcgccttctcaccatgtcgtcctgcggcgagggccttctcactgcgtcgtcccatggcagagttggaaggcaagaaagtgtgtgcatgcacgagaaagtggctgaacagatccttttatcaagaacccactcccgagataatgccattcatttgttcgtgagggcaaacccctcatgacctggtcacctcgtaaaggccccacctgccaacaccattgcattggggattatgtttccaacacatgaactttggggatgcattccagccatagcacaggcacccgtaacgtattgcagatgggactcttcacttccagccccgccaccaccacacacacctgcctgtcaagcccgtcctcctcctgcattccctggttcagacagtgaaccctggccttggcttttcaaccaaaacccgggcgtcatccttggttctccctctccctcatcacccacacacagtccatcagtgagtcctacacattgtaccttcctggaaaccctgaatcgctcggcgtcttcccgtcagcaccggctgcctcttctaggcctccaccgtctcgtggacactgcagcaacttctcacagagctttcactcccgctttccctcctgcccctgcacagcccctttgccacacagcagccaggacagtcttatacaagtaagccatacatctgtcccttgtttagacccttcagtggcttctcattggcacttagagcagaatccttatgctttgaggcctccgtgctctggctcgtgcccacctctccagattatttccagacacttcccgctgcaatattgcactaccacctactgtctgtcttttcggacctccaaaacaccgaggtcttttctctgtcaggatcttcacatttgcttttctctctgctgaaaatcctcttactccaggctgggcgcggcggctcacgtctgtaatcccagcactttgggaggccgaggcgggcagatcacgaggtcaggagatcgagaccatcctggccaacacggtgaaaccccgtctctactaaaaatacaaaaaattagccaggtgtggtggcaggtgcctgtagtcccagctactcgggaggctgaggcaggagaattgcttgaacctgggaggcagaggttgcagtgagctgagatcacgccacttaactctagcctgggcaacagagtgagactccatctcaagaaaaaaaaaatcatcttactccaaatctacaaattctcacacctcctcatcctgcaggtcccgatttgtgtgccctttctcaggagaccttctgtgaccaccatctcccttattctcatcactgcataagtccttcaccacacctgtcaattcaccacacttaggaattatcttgtttctttattttgttgtttttccaggatctcctcccccttacttctcaaagtaagttcattccttgaggacagagagagagaccatactgtcttgtttaccattggattcccaatgcctagaatcatgcctggtatatgggaggcattcagtaaatactcattgagtgattgaaggagtgaattaaggagatgctgactcgtgcctagaactataactgcctcaggaattcatagtctttagtcacggacagtccagtgcatgtggtctatacacatccgtggcctgctgacacgctcacagacactttagctgtaggtagtctttactcacggacggtccagtgcctgtggtctatacacgtctgtgggctgctggcactcacaggtactttagctgtaggtagtctttactcacggatggtccagtgcatgtggtcgatacacgtctgtgggctgctggcactcacaggtactttagctgtgggtagtctttactcacggacggtccagtgcatttggtctgtacacgtctgtggcctgctggcactcacaggaactttctggtctccacatgtcacaactgccctcatgttgcttcccctcctagcagaagctgcagctgtgttgtaatactttcattgtgtagcatctgtccttgtaggtttttatttcagtggaaatgctgggctcaccattagctttttgcttgtttttttgagacaagatctcgctcagtcaccaggctggagtgcagtggcatgatcacagttcactgcagccttgacctcccaggctcaagtaatcttcccacctcagcctcccaagtagctgagactactggtgtgcgccaccatgcctggctaacttttttttttgcagagaccgagtcttgccatgttccccaggctagtcttgaactcctgggctcaagcaatcctcctgcctcagcctctgaagtgctgggattacaggtgtgagccaccattagctttctgcctgcctgcctgcctgcctgcctgcctgccttccttccttccttccttcgttccttccttccttccttccttccttccttccttcctttctttctctttctctttctttctttttttctttctttctctttctttttttctttctttctctttctttctttctttctttctctttctttgtctctctttctctcccttcttctttcattctttctctttcttttcttttctttccttttggagtctcgctctgtcacccaggctggagtgcagtggcgcaatttcggctcactgcaagctctgcctcccgggttcaagcaattcttctgcctcagcttcctgagtagctgggactacaggtgcgtgccactgtgcctggctagttttttgtatttttagtagagatggggtttcaccgtgttagccaggatggtcttgatctcctgacctcgtgatctgcccgccttggcctcccaaagtgctgggattacaggcgtgagccactgtgtccggcccagtgttcctttctaagtgcatttcattggttttcaaatggcttactatgaaagtctttaagatttgttgcagttctggagtccccattcacggttcaggtttttttgaatgcacaatctggaacttccaagtccagagctttcccttgccccaatttagagctacccctgtccctctgtgtgagtctttgcatacacccacacacagagatctacttgtcctatttgctgttatcaataacatgtacagtaatgactgaggtagaggggaatcatttagttttaagttgaaactttgtgaggaacattggtaagagtcccgagtgtttacctgttcgcagccactggactctataggtctctactattttggtccagaaaaattgttggcataagtacaatgaatcaggagagcttcatggaaatttcttttgtgcctagcattgattacagttagtgactggagctgtctctagccactttttgtttttcatgtatttcccttactctaggcgcttgaagaggctcagaaagctatccaacaactctttggcaaaatcaaagatatcaaagacaaagctgaaaaatcagagcaaatggtgagttctggtttcttcctaacctttttgcaccaaaagaggaagtgagcttctcatctaggcattctaataatgagctttttctaataatggcacctcctgccaaccagagtcatctgcatctctaaagcaagccccctatgaatgcgttcagatcaattcaaggggagctgctggtcagtggtggctcaccatctctgctgccctgtgtttgcagccctagttttaaataggcaacttttttgttttgttttgttttgttttttgggtatttttttttttttttttgagatggagtcttgctctgtcgccagccttggagtgcagtggtgcgatcttggctcactgcaacctccgcctcccaggttcaagcgattcccctgcctcagccgcccaagtagctgggattacaggcgcctgccaccacgcccggctaattttttgtatttttagtagagaaagggtttcaccatgttggccaggatggtctcaatctcttgacctcatgatccgcccgcctcggcctcccaaagtgctgggattacaggtgtgagccactgtgcccagctgcaacttttttttttctcctttctgaaaatagtttcctagtcattttggattttcctttctctaacatttcttggtattggtatcatgcatttctccatcgagatgtacggtatgtagctcgatgcacgctgagaatggtcctggagccgggaggagggagggatggagggaggagggatgtccccgcccatgatctgtgtatgtggttttggttgagttctcccctgacaaatttgtgtcccccggtgttgtgctcagaagcttgccccgaagaccgagaatccagcattcaccttctcctcctccatgggaggcgctgggaagtgctggatcctgggttcagattcagactcaataatgtcctgtctgtcagttgtctcagaattccagcttcttcaactgtaaaataagaataatggcatttgcctcacagggttgttgtgagaattaaacgtatgaagagcactgagcatagtcctagggacctggattttctgtggtccttccccaagggtgcaccacacccagcagcacccaggggccctcgtccttcaccaaggatgcaccacacccagcagcacccaggggccctcgtccttccccaagggtgcaccacacccagcagcaccaggggccctcaaagcgtgaagatcagcgagagtatccgatgctgcttttgctggagttgattgcatttattgatatccttatgatgctaatctgtgttctggagtatgcttcctcttccaaccgagggggtttgcagtgacagtttactcccaagttatgagatgtcttattttaaagcagcttgctttcctggacagtgctgtgctgaagggaggaagaggtgggagtgaggggagaagtgatctttgttgagctctttcagtgccagcagtgtgctggttcctttgtgtcagcactctaatttagccctcaccacaaccttatgaactaggatttatgttcattattatctttgcgattacccatcttatagatgagaaaactgagactcagtgaggctgagaaacttgttctaggatgcatcgttggtgagtggtagagctggggttcagccctagatctgtctgactctacaacctcccatttcatgctctacccgttttcgcagcccgtgggcaacagttgaggcaaatcaactatgggcattctgtctcacaggtggtctcgtgtaagtcagttgaggcgaatcaaccatgggccttctgtctcgcagatgatctcgtgtaggtttgacctgagtacccctggtgtgccctgccattgatggctttgtttagggaaaaatcagtggttcagtttgtctagagaaacacaggctgtgggatggggagtgacgggagatcctgggaataaagagaccagtcagctccagtgcagagcagtgagggcctgaacaaggagtagagagaagggatagagtcttgagatgaagcagagggagaatatttaggacatagagagaagggatagagtcttgagatgaagcagagggagaatatttaggacatagagagaagggatagagtcttgagatgaagcagagggagaatatttaggacttgatgcagggaccaggaagagtcatagatgatgtgactttgaacacagtggttaaagacccctgatgcagccgggcacggtggctcatgcctgtaatcccagcagtttgggaggccaaggaggggggatcacttgaggccaggagttcaagaccagcctggccaacatggcaaaaccgtgtctctactaaaaatacaaaaattaaccaggcgtcgtggagcacacctgtaatcccagctactctggaggctgaggcagagaatcgcttgcctgggaagtggaggctgcagtgaaccaagatcgcactactgcagtacagcctgggcgacagagcgaaactctatctcaaaaaataaaaaaataaataaataaataaagactccctatgttagactgaagctaaaaacgctggaagagatacagagatttttttgtaggaaaaaggatgctgatttcagagttgcaagtgggtgatcaggttacagggccaatcttcagccttctatatctaatttattataccactcctgatttatttatttttattttttttgccccaaatttaagtatttggtaaagtggtggtggtcttaacctttttttttttttttaattcattggaaacagagattgtttggaggttacaggagagaaggcttgatggggaagtccccatgaaagaggctttttatagctaagatccaggtaaggcttgcaggatcataggtgtggaattgagctgtgcaggtcgtaacctgtatgagttcacctagggtgatcagaccctgaaagagcagggcacacgaactcacggccgagtgtctcacttcagtgggatgtatctatccacgaactcacggccgagtttctcacttcagtgggatgtatctatccacgaactcacggccgagtgtctcacttcagtgggatgtatctatccacgaactcacggccgagtgtctcacttcagtgggatgtatctatccacgaactcacggccgagtatctcactttagtgggatgtatctacccacgaactccctgccgagtttctcactttagtgcgatgtatctatccaagaactcacggccaagtttctcactttggtgggatgtatctatccacgaactccctgccgagtttctcacttcagtgggatgtatctatccacgaactcacggccaagtttctcacttcagtgggatgtatctatccacgaactcacggccgagtttctcacttcagtgggatgtatctatccacgaactcacggccgagtttctcacttcagtgggatgtatctatccacgaactcacggccgagtgtctcacttcagtgggatgtatctatccacgaactcacggccgagtttctcactttagtgggatgttatctatccacgaactcacggccgagtgtctcacttcaatgggatgtatctatccacgaactccctgctgagtttctcactttagtgggatgtaactatccacgaactccctgccgagtttctcactttagtgggatgtatctatccacgaactcacggccgagtatctcactttagtgggatgtatctatccacgaactccctgccgagtttctcactttagtgggatgtatctatccacgaactcacggccgagtatctcactttagtgggatgtatctatccacgaactccctgccgagtttctcactttagtgcgatgtatctatccaagaactcacggccgagtttctcactttagtgggatgtatctatccacgaactccctgccgagtttctcactttaatgaggatatatctatccacgacctcaacggccgagtttctcactttaatgaggatgtatctatccacaaactcacggccaagtttctcactttaatgaggacgtatctatccatgaactcatggccaagttactcactttaatgggatgtatctatccagtgactacagtatttgtgtttggtatccagggcactcccttccttccaggtatcacagaacctgggcaaccaaattgctattaagaaactttcgctatgtgcaccggaagacaaaggtcctcttttccttgcctaatgcagccatggctcgtggtgccaagaagcatctgaagcgggtagcagctccaaagcattggatgctggataaattgaccggtgtgtttgctcctcgtccgtccaccagtccccacaagttgagagagtgtcttcccctcatcattttcctaaggaacagacttaagaagatttgcatgcagcggttcattaagatcgatggcacggtccgaactgatataacataccctgctgggttcatggatgtcatcagcattgacaagacaggagagaatttccatctgatccgtgacaccaaaggttgctttgctgtacacctgaggagaccaagtacaagttgtgcaaagtgagaaaaatctttgtgggcacaaaaggaatccctcatctggtgactcatgatgctcgcaccatccgctaccctgacccctcatcaaggtgaatgacaccattcagattgatttggagactggcaagatgaccgatttcatcacgttcgacactggcaagccatatatggtgactggaggtgctcacctgggaagagttggtgtgatccccaacagagagaggtacccgggatcttctgacgtggttcatgtgaaagacaccagtggcaacagctttggcactcaagtttccaacattttcactattggcaagggcaacaaacgatggatttctcttccccgaggaaagggtatccgcctcaccattgctgaagagagagacaagagactggcggccaaacagagcagcgggtgaaatggtccgtgggtgacatgttagatctttgtacgtaattaaaaataatgtggcatgataaaacacacacacacacacacacacacacacacatttcttagtcagcatggaccaagaaacacagtggatgatttcacctgggtgttagtaaagttggggaatttttccaacttctctattgaatatgcttttctggtgactgaaatatacttgcattcccagagacagcttctcttctcttggacctgctgaaacaacactgtcaggctcttactccccaaattgccttctcactccctgaagactgctcctgccctcctagtaacttacatgttaagcgtatgttacagagcttatatttcaatcttcttgagatttgaaagtcttctttgctggaagctcaggccctcattccattagtaaagaccgtctgagtacctagtactgactgataggtgttttatatggcccagcggcttcatcaccagaaggcacactttcctcaccttgttcaaggaaaggtgctgtgcttacctcctctgtcctgtgtgctcaatactgaattgctgtttggatcatttcatttggggtaaaaaaataaagttcatttcatgctcacaactgaaggttttataaccctgagtaaagtccaaagagatgccacattaaattttaaatgcctggttggaaattatttttattttgtattgtgagaatgtttgctaacctgagatttttccctgcttcatctgcattcgtttcttacagagctacttgcagaagtgttttacatctttcttgaccgtcttcctttctttcttgtggtttttcaatgtttaggtgaaagaaatcacccgtgatattaagcaattagatcacgccaaacgccacctgaccacctcaatcaccacactgaaccacctgcacatgctggcaggaggtgtcgactccctcgagtaagcaatgccaactttctcttttggggccacgggaaatgtatcgcatagagaaaatggtgttgtcgcctatttacttctcagccaggaaagtctcaccatcctgccccactttctgcaaattggcttcaagtgttcagtcaccatttttgctttgtgccctctggtgttcagaacctaacaaacactggcagctagtcaaaaggggaccccagaagcctttcaggacgactccaagaatatggcccatcttcaggctgtggctctgtaccatcaaggcagacagagtgacacagggccatattcactccaggcagacagagtgacacaggcccatatgcactccaggcagacagagtgacgcgggcccatattcactccaggcagacagagtgacacaggcccatattcactccctgctgcttctgcctcagcaggtttcctgcttgcgttgggctgagttgcactgtcatggaagagaccctatgagacagaactcaatcattcaaaccacttttttttataaagtagatttccgtttggcttgtagagggaatgatacatcagaacattagaaatagagaaggaagagctggtgatttactacaaaggagcaatctaaagcctcctttactagcaagattctgacactccagctcacctctgtggcccgtctcaggctggggactccccctgctccagcctcagtgtgattccgtatgtggacagggaaagcgcatcgtcatagaaactgagatgcagcattcaaagtcctgggtgggggaagtgggagagtgccttgagggaaagaggaggaggggcgggccccttcctgacctctctaggtattggatgagctccagggatgcctggtccactctcctgtgagcagtgagagcagcggccagagggaggccagagggcggtcacatttgttccttcgtggggtggtcggtgtccaccaaaccatcagaccaggcagtggtaagactgggcggtggtaagaccaggcggtggtaaaaccaggtggtggtagcaacggaacaccttggcttgaacttgatcctgtctttttcttttttcttttttttttttttttttgagttggagtctggctctgtcgcccaggctggagtgcagtggcgcgatctaggctcactgcaagctccgcctcccgggttcccgccattctcctgcctcagcctcccgagtagctgggactacaggcgcccgccactaagcccggttaatttttgtatttttagtagagacggggtttcgccgtgttagccaggatggtctcgatctcctgaccttgtgatctgcccgcctcggcctcccaaagtgctgggattacaggcttgagccaccgcgcccggccaatcctgtctttttcaatgcttcttatggaaaatcataaattacaaatttaatgaaataacccaaccctaatgaaaaatttagatctaatagtttatatttcctccctgtgtgtaacttgattttatcagcatccttttatttaagcgtcattaaccttagcagtagggaaagtagaggtctgtgatacagacgccttagaacctacagatttcagttaataggtaaagtgctgctctttgtgtatttttgtttttgtttttgagacggagtctcccactgtcaccctggctggagtgcagtggcacgatctcgggtcactgaaacctccgcctcccaggttcaagtgagtctcttgcctcagcctcccgagtagctgggattacaggcatccaccaccacgcccagctaattttgtgtatttttagtagagacggtgtttcaccgtgttggccaggatgatctcgatctcgtgacttcgtgatctgcccgcctcggcctcccacagtgtgggtatgacaggcgtgagccacctcggcctcccacagcgcggggatgacaggctgagccaccgcgcctggccgcaccctttgtgtttggtttgctcataggctgtaatcctcagatagtaacatccctaccccggttctctgtcccaagcttgctaatcccataatatccaacccaaattctaaattcatcgtcttcccagattcccctccccacaccaaatgagaattcatcactcacacattcttcctgccgtagcacataatttgtacttctgtttagaacatagttcatcctttttgatactagttagatgtgtacttgactctctcccttactatatggtgtcaccttgaggatttggaccagatcctgttttttcctcccacaacgcacagcagcttatatactcagtgctcagcgaacgttgattcagctgagttgatatctgtttgagagctagcgtgggttgttctgtgtctgtatcttgcgtctttagtgtttttctagacttttaaacttattctttccttgcagagccatgaccaggcgaagacaatacggagaagttgctaatctccttcagggtgtgatgaatgtcctggagcacttccacaagtatatggggattccgcagatccggcagctttccgaaaggtaaactgtcaccagagggaaagtatatggggattccgcagatccggcagctttccgaaaggtaaactgtcaccagagggaaagtatatggggattccgcagatccggcagctttccaaaaggtaaactgtcaccggagggaaagtatatggggattccacagatccggcagctttccgaaaggtaaactgtcactggagggaaagtatatggggattccgcagatccggcagctaaactttccaaaaggtaaactgtcaccggaagaagtgatcttgctttcagaaaaggacctggtgctaggaagtgcttaagcacttagctcagcgtgttcactgcagagtcttagtgtgtgaaggaatatcagatgctacctgatctaactgtctggtgcagacgttcccccactttaccccttcccatgtcttccaaagctgcctgtggtagatagttacagttgtatatatggacaactctcagttgtccccatttgtgagagaaactgttctaggtatctatttctttgtaacaaaccagcacaaaacttagtagcttaaaacaataattgttttgcacgtataatttggcctggctcggggaccagctcatccctgctccgtgcagcattagccgaggcagctcaggaggggactggagaatgcattggctcactctcatggctggctccttggtgcttgctgtcagctgggagcttggccaggccgttgctgggattctttgttgtcttccacgggctgcttggacttcctcacggtaaggtggctggttccaagaatgagcgtcccaagagaaccaagccttggaaatttcatagcatcacttctgccatagtcacaaggctgctaagattcaagaggaaggaacatagtcttctcccacccactaacgggaggaatgtcaaagtcacattgttacaaaaagcatgtgggatgggatagattgctgtggcggtctttagaaaatacagtgagccacggccgggtatggtggctcacacctgtaatcccagcactttgggaggccgaggcgggtggatcacccgaggtcaggagttcgaggccagcctggccaacatggcgaaaccccgtctctactaaaaatacaaaaattatctggacatggtggcaggtgcctgtaatcccagctactcgggaagctgaggcaggagtcacttgaacctgggaagtggaggttgcagtgagctgagatcctgccattgtactctagcctgggcgacagggtgagactcaaaaaaaaaaaaaaatacagtgaaccacaaaaactttagatacgataaaaagatgactttccccccaaccttattctttccttcttattgctgttgagttttaatcccagattcagatccagtggaaaggaaagtaatttctcagagcgaaggaggatgaggattccaagggaggacgaggaggagttgatgcaccaccttttctgttagaaggaggggcaggaagaacactgagaaggcagagaccgtcacaattgacaaattctaaccttccttgcagcaaagaagaaatgaaggcgttgttactgagcagcagctacgtttctgactctgccttcttaataaggcccgaatgctacaggcttctttgttttccttaagtttccttatttgtaattatataagtaatacacatagactttaaaaaatagagacagggtctcactctgtcacccaggatggagtgtagtggcagaattactgctcactgcagcttggaactcctgggctcaagtgatcctcccaccacagtttcccaagcagctgggactacaagcacgcagcacctcacccaactaactttgttacttttttgtagagacagggtctcactctgtggcccagggctggtcttgggctcccagtgcatcggggttacaggcgtgagccactgcacctggttccacatcttctattgtttaaaaaggtcaaatatgtatacaggtgaaacctaagttccctttacctagacttcagaatcccattgttgtcctcagaggtggtaattgttatcagtttaatggctatcactgcggatttgtgtgtgtgtatttacgtaaatctgtagtttaatggctatcgctccggatttgtgtgtgtgtatttacataaatctgtagtttcagtggctatcgctctggatttgtgtgtgtatttacataaatctatagttttaatcctatctctccggatttgtgtgtgtatttatataaatctatagtttcagttaatggctttgtttttgctttgttttgttttaactaaatggtttcatgccttacgctttattctaaaaactgctttttgttttcaaccacatgtattttagatattttttttctcatcagtatgtataaacctgcttcattctctggaattgatgcacagaaccccatagcgtgacataccacagattatttcaccattttggtagcactaggtcgttgtttctaattcttaaaatatgcccccttttgcacatatgcaagtatttctctgggacagattctgggttataggtttgtatacatttaaaattttagtagctactgcccatttgccctccagcaaagctttatatacttgtagtacgatctgtactgtatgagagcacccttaccctcagcaacacttgatattgttgtttttcatttttatctatcttatggttgaaaacggtatccggttcctttaattttcattttccttgtagctagtaagattagtgttttgttttgtttttttgagacggagtcttgctgtgttgcccaggctggagtgcagtggcgtggtcatagctcactgcaacctggaactcctgggctcaaaccatcctcctgcctccacctcctgagtagccaggaatacaggcaaataccaccatgcctggctgatttttaacatttttctgtagaggtgggatcttcttatgttgcccaggttggtcttcaactcctgggctcaagtgatcctcctgcctcatcctcccaaagtgctgggattacaagcgtgagccactgtacctagccccagttgtcttcttcctctaaacactcatgagtttctcatactctaagaaattattctcctttattcctttctttgagtagtctctacaacttggtctctgcattctttccttgtggaattcttgttacgtgaacgttggatcttctagatctgctgccatgtctcttaattttcctttcatgctttctgtctctttgtccttttgaactgctttctgaaagaattcctcaacccagtcttcctattttaatttattcttcacttgcatccattgtgctatttggcccagctgttgaatttttattttaaaaatccagctttttaatttccagcatatctagctgattcttttctcatgggcataatattctcatgtctctcccacggaatagaaattatgtgtttgttaaagcactgggttgcctgttccatttctctgtcctacagtgtacaatcttcagtgcctgttccattcctctgtcctccagtgtaagatcttcagtgcgtgttccattcctctgtcctccagtgtaagatcttcagtgcctgttccatttctctgtcctcaagtgtaagctcttcagtgcctgttccattcctctgtcctccactgtaagatcttcagtgcctgttccattcctctgtcctccagtgtaagatcttcagtgcctgttccattcctctgtcctccagtgtaagatcttcagtgcctgttccattcctctgtcctccagtgtaagatcttcagtgcctgttccattcctctgtcctccagtgtaagatcttcattgcctgttccattcctctgtcctccagtgtaagatcttcggtgcctgttccattcctctgtcctccagtgtaagatcttcggtgcctgttccattcctctgtcctccagtgtaagatcttcggtgcctgttccattcctctgtcctccagtgtaagatcttcggtgcctgttccattcctctgtcctctagtgtaagatcttcggtgcctgttccattcctctgtcctccagtgtaagatcttcggtgcctgttccattcctctgtcctccagtgtaagatcttcagtgcctgttccattcctctgtcctccagtgtaagatcttcagtgcctgttccattcctctgtcctccagtgtaagatcttcagtgcctgttccattcctctgtcctccagtgtaagattttcattgcctgttcattcctctgtcctctagtgtaagatcttcattgcctgttccattcctctgtcctccagtgtaagatcttcagtgcctgttccattcctctgtcctatagtgtaagatcttagtgcctgttccattcctctgtcctccagtgtaagatcttcagtgcctgtaccattcctctgtcctccagtgtaagatcttcattacctgttccattcctctgtcctccagtgtaagatcttcagtgcctgttccattcctctgtcctatagtgtaagatcttcagtgcctgttccattcctctgtcctccagtgtaagatcttcagtgcctgttccattcctctgtcctccagtgtaagatcttcagtttgttcagcatggcaattctttctctttagcatttctcaaatgtttagtgattcttagctgaaacctcatttttattttatttgtttattttttgagaccaagtctcactccatcgcccaggctggagtgcagtggcacaatctcagctcactgcaatcgccgcctcctgggtttaagcaattctcctgcctcagcctcccaagtagctgggactacaggcgcccaccacccatgcccagctaagttttgtatttttagtagagacagggtttcaccatgttggccaggctggtctcgaactcttgacacctcaagtgatccacctgtctcagtctcccaaagtgctgggatgacaggtgtgagccaccgtgcccggccttatttttatttttgacattctctattagtctgatcaagaatgctcttttactgctacctgctcgtgggcgagaaatgggaattgctacttggctaagtgtatcacagacagcttttccaaagtgaggggggccagacctggagaaacctgccaggtgggtgtcccagcagctgatctcctaggcttggaggctccctggtcttcttgggtgttggccgcccctctggctactgctgaagttctcagacccagaggcccacccctgccgcctgacgtgagcattcacgcattcacggtgtgggtgcagacacggacagcggccccatcctgctcctggtatcgccaccttcatgtctttcattttcgagaagcatttttgggcagtgattttctgtcatccttcctaccaggaagtcctcaggcttctagtataccacttttcttgtctggatttggattttcatgaaaatctttttattatttctgacgctccggggcaggaatgggaggttgcaacgtgtgctcagtgtgcatcttgccgagcttggcagaacgctagggaaatcgccaccctttccctcatccttcctacccctcacacctagagccagctgatcaccttatcagactggactgtgaggcagccaagaaagcaggcgaacaggactttatgagctgcaagaaagaaggagcctggatggagcaggcagatttgctgtcagcggatgggggaggaggaaggcagtcccttctacccctgctctcaggatgattcagagttgatctctttcatattcatttgttcttttcttcatttgcatgatagatatttactctgcattttctacatcctaggccccgtgctggggactgaaggcacaaagataagaaatacacactctctgccttcaaagagttcaccatttttgtatggagaagaaagacattaatagaagattccagtataacagatgtaacaaaactggtatatgctgtacaaggcatagcaggatctcagaagaggaattgataggctgaagcaggggctgagggcaggggtcatagacaaattctgttttaatctgaatcttaaaagaatgggtgggatcttaccaacgtgacagtaatgggggaaagaaggaagagggagtctcatggagtttggaggcagcagagggagacagggctgcataggtagatcgggtcaggttttatatgccttgctaaataatttattttttattttgtggacagtgaaagattttaagtgcggggggcatgatctcacttgtattttgtaaaagtctagtggattatagaggtacaggagtctggataaaataagacccttaggaggcagtggccacgcggtcacggagatgtgtgtgggagccgatctccagtccgtgatatggattagaaaagataagacccttaggaggcagtggccacgcggtcacggagatgtgtgtgggagccgatctccagtcagtggtgtggattagaaaagataagacccttaggaggcagtggccacgcggtcacggagatgtgtgtgggagccagtctccagtccgtgatatggattagaaaagataagacccttaggaggcagtggccacgcggtcacggagatgtgtgtgggagccgatctccagtcagtggtgtggattagaaaagataagacccttaggaggcagtggccatgcggtcacggagatgtgtgtgggagccagtctccagtccgtgatacggattagaaaagataagacccttaggaggcagtggccacgcggtcacggagatgtgtgtgggagccaatctccagtcagtggtatggattagaaaagataagacccttaggaggcagtggccacacggtcacggagatgtgtgtgggagccgatctccagtccgtagtatggattagaaaaaataagacccttatcaggcagaggccacgcggtcatggagatgtgtgtgggagccgatctccagtccgtggtatggattagaaaagataagacccttatcaggcagaggccacacggtcacggagatgtgtgtgggagccagtctccagtccgtggtatgaattagaaaagataagacccttatcaggcagaggccacgcggtcaccgagatgtgtgtaagagccagtctccagtccgtggtatgaattagaaaagataagacccttatcaggcagaggccacgcggtcaccgagatgtgtgtgggagccagtctccagtccgtgatatggattagaaaagataagacccttaggaggcagtggccacacggtcacggagatgtgtgtgggagccagtctccagtccgtggtatgaattagaaaagataagacccttatcaggcagagaccacgcggtcacggagatgtgtgtaagagccagtctccagtccgtgatatggattagaaaagataagacccttaggaggcagtggccacacggtcacggagatgtgtgtgggagcctatctccagtcggtataaaggaaggggttgtgcatggcaggaacatgacagaactaacttttatttggcagaaaccagcatagggattcgttaataactcaaaatggatctgtaacctagatgtaaaacctaattctaaaactcttagaagaaaacgaagaccagatcttcacaccactgtatttggcagcagtttcttggatatgacaccaaagtcctaggcaacaaaaggaaaacatagataaatgggactttatgaaaaattttaaaacttgtgcatgaaaaaacactatcagcagggtaaaatggcaatgcacagaatgggaagaatatttccaaatcatttatctgataatggattaatatctagaatatataaagaattcccagaaatcaacaacaaaaagccaaacaactcaattaaaaaaccagcaaaggatttgaataagcatttctccaaagaagataaataaatggccaataaacatgaaaagatgcccccgttaggacgtgaagtgacactgcattgtggtttccacctgcatttctccaacaggctttttaggttgatgtagtcccacttgtttctttttgcttttgctgcctgtacttttggtgggctctttgcttttcaacatttgtttaaagaggtagttttaaaaatttgaaggaacttaataatcactgttataatcacattcctgaaaaatagaaagtccaacattctatgaatatatttcagtgctccaaacattcattatcacataaggttgctgcaaacacaggaggatttacttatcttttagttcatttcgcaatctctatttgcaataattttgtgtaggttaatacagaatatgtgctattaagtaacactaaaaaggctgggcatggtggctcacacctggagtcccagcactttggtaggctgagacaggcagatcgcttgagctctggagttcaagaccagcctggacaacatggtgaaaccctgtctctaccaaaaatacaaaaagtgagctggtgtggtgatgtgtgcctgtggttccagttacttgggaggctgaaatgggaggatcacttgagctccggaagtggaggctgcagtgagccgagactgtgccactgcactccagcctgggcaagaaagcagacccgtctcgggggaaaaaaaaaaataacactaaaaagagcacaagaggagacaacttcttatttttattttcagtgcttgactaggattgtttttttaagaggtactaaacgtttgagaaaagtccagacttcttatttttagcatcctttctggtgaatttgcttcccttatgtttacgtgctgatggtagaaccatctggaaatgagagaaatagctatttgttgtaaggggcgggagatggcaggcgggttaccaccctctgcattgcttccgtttctcaaatttactgtcttgctgtctgtaaagtgtagaagtcatgtgaaaagttgtgttctgaaatctttgcctgtacatttgaaataggaagttcatgagccttgatttgagcatagctaattcttccaactacccttctggcaaatgcttccatgcttaatgtagcattggaggaaagagttttttctttagcatctttacatttcaaatcctcctggcctaagcatatccgtgaaagggaatgtttctagtcatcagtcagtatctcccaatgaagaatggaagagccttacattctcttgaaaaccatgaaactcttgaacgaaaatatatttttcacagccatttctaacctcttataaatgtgagaaaggcttggcaggtctcatgatggagtgaaaaaagaactcaacctggaaatggacaggcctgcacagctctatggcctcgacaagttcctcctgggcctcctgggttgacacgtatgagtgttgtcctcggtttccaagtatgagtgttgtcctcagttgccaagtatgagtgttgtccttgatttccaagtatgagtgttgtcctcgctttccaagtatgagtgttgtcctcactttccaagtatgagtgttgtcctcactttccaagtatgagtgttgtcctcgctttccaagtatgagtgttgtcctcgctttccaagtatgagtgttgtcctcggtttccaagtatgagtgttgtcctcggttgccaagtatgagtgttgtcctcggtttccaagtatgagtgttgtcctcggtttccaagtatgagtgttgtcctcagttgccaagtatgagtgttgtccttgatttccaagtatgagtgttgtccttgatttccaagtatgagtgttgtcctcgctttccaagtatgagtgttgtcctcgctttccaagtatgagtattgtcctcagttgccaagtatgagtgttgtcctcggtttccaagtatgagtgttgtcctcagttgccaagtatgagtgttgtcctcggtttcccagtatgagtgttgtcctcactttccaagtatgagtgttgtcctcactttccaagtatgagtgttgtcctcggtttccaagtatgagtgttgtcctcagttgccaagtatgagtgttgtcctcgctttccaagtatgagtgttgtcctcgctttccaagtatgagtgttgtcctcgctttccaagtgtgagtgttgtcctcggtttccaagtatgagtgttgtcctcagttgccaagtatgagtgttgtccttgatttccaagtatgagtgttgtcctcgctttccaagtatgagtgttgtcctcgctttccaagtatgagtgttgtcctcgctttccaagtatgagagttgtcctcggttgccaagtatgagtgttgtcctcggttgccaagtatgagtgttgtcctcgatttccaagtatgagtgttgtcctcgatttccaagtatgagtgttgtcctcgctttccaagtatgagtgttgtcctcgctttccaagtatgagtgttgtccttgatttccaagtatgagtgttgtcctcgctttccaagtatgagtgttgtcctcgctttccaagtatgagtgttgtcctcggttgccaagtatgagtgttgtcctcggttgccaagtatgagtgttgtcctcgctttccaagtatgagtgttgtcctcgctttccaagtatgagtgttgtccccagttgccaagtatgagtgttgtcctcagttgccaagtatgagtgttgtccttgatttccaagtatgagtgttgtcctcgctttccaagtatgagtgttgtcctcgctttccaagtatgagtgttgtcctcggtttccaagtatgagtgttgtcctcagttgccaagtatgagtgttgtcctcgctttccaagtatgagtgttgtcctcggtttccgagtatgagtgttttcctcgctttccaagtatgagtgttgtcctcgctttccaagtatgagtgttgtcctcgctttccaagtatgagtgttgtcctcggttgccaagtatgagtgttgtccttggtgatctcagaagtgtctcatggggtcactcaagattctaggctgagattctttatggtgtctgtttggaactgtagcatttgactaattaaccctgctgtttagaagactgtggtttgggagggcggtatatttatttgggaactgttgggggtgttttctttgggactgtcactcacaaggtaacaaaagtctcagggctactttatccacagatatctgaacaatgttcataatttgctgtctgtctgtgactcccccttacgaaaagctgagaacacttttaggaaagggtgccttggaacagccctgcagtcacgtggcatggaggatgccagaaaccacctggttgactttcctttctgggcagcacaatgaatcttttgtttctgaagagtgacccatttggggttgccaccatgcaacaggctgaacttacgtggatgccaggaggaatttttgttttccctgttctctatgagttgtaggcggactttcacaagaatggctaggaaatcagttgggcacagtggctcatgcctgtaatcctagcactttgggaggctgaagtgggcagatcgcttgagcccaggagtttgagatcagcctgggcaacatggcaaaactccatctctacaaaaaatacaagaattagctgggcatggaggtgcacacctatagtcccagctactcaggaggctgagagaagggaggatcacttaaccctgggaggttgaggctgcagtgagccacaaatgcaccactgtactccagtctgaaaagaaaggaatgactaggaaatcttggtagtttggcacatatatgtgctttgctgacagttatcagttgagctacctctttgtagtgggaaccttttcatggttagaagaggaaggagtttaaaggaatgaggccaaagataaattctttcaagtctgttgacttctttctagaatcctatttaagcaattgcttataaagactgaaattcacatcttaccctgaaaatgcatgggattgaggtttgggtctatagataccatcagtgatgtctgtaagggaatagttgctttcatctgagtcattgatagccacttcacaaactgctattggtagaggctgggcgcagtgactcacgcctgtaatcccagcactttgggaggccgaggtgggtggatcacctgagatcaggagttggagaccagcctggccaacatggtgaaaccctgtctctactaaaaatacaaaaaattagccaggcgtggtggcaggcgcctgtaatcccagctacttgggaagctgaggcaggagaatcccttcaacccaggaggcggaggttgcagtgagccgagattatcccattgcactccagcctgggagacaagagtgagacttcgtctcaaaaaaaaaacaaagaaaaaaactgctgttggaaacattgacatttatatgcgtatccttctgctccaggattaagcatacatctaacctctagccacctgtaaagccagttagcaccgtaagatgggtgttgtggaataatcagtactggagaggacacagaatcatctagtatgggctgctagccccaccctcttatttcacagctattcaaagttgtgacccacagagaggaagtgacttgtgattatgcggctcactagtaacataaccaggtccagcctatctcaagaggtgactttgaaaatgaagaacatggcgacataggcagttctaagatggctgaataggaacagctctagtctacagctcccagcttgaacgacgcagaagacgggtgatttctgcatttccaactgagttaccaggttcatctcattggggcttgtcggacagtgggtgcaggacagtgggtgcagcccaccaaacatgagctgaagcagggcagggcatcgcgtcacccgggaagcgcaaggggtcagggaattccctttcatagacaagcaaaggtgtgacagacggcacctggaaaattgggtcactcccaccctaatactgcacttttccaacagtcttagcaaatggcacaccaggagattatatctggtgcctggctcggcgggtcccacacccacggagactcgctcattgctagcacagcagtctgagatcaaactgcaaggcggcagcaaggctgggagaggggcgcccgccattgctgaggcttgagcaggtaaacaaagtggccaggaagctggaactggatggagcccagcacagctcaaggaggcctgcctgcctctgtagactccacctctgggggcagggcatagccaaacaaaaggcagcagaaacatctgcagacttaaatgtccctgtctgacagctttgaagagagtagtggttctcccagcacagaatttgagatctaagaatggacagactgcctcctcaagtgggtccctgacccccgagtagcctaactgggaggcaccctccagtaggggcagactgacacctcacacagccacgtacccctctgagacgaagtcaggcagcaacattggctgttcagcagtatttgctattctgcagcctccgctgctgatacccaggcaaacagcatctggagtggacctccagcaaactccaacagacctgcagctgagggtcctgactgttagaaggaaaactaacaaacagaaaggacatccacaccaaaaccccatctgtacgtcaccatcatcaaaaaccaaaggtagataaaaccccaaagatggggaaaaaacagcagaaaagctgaaaattctaaaaatcagagcacctctccccctccaaaggaacaaagcacctcgccagcaatggaacaaagctggacggagaatgactttgacgagttgagagaagaaggcttcagacgatcaaacttctctgagctaaaggaggaagtttgaacccatcacaaagaagctaaaaaccttgaaaaaagattagacgaatggctaactagaataaccagtctagagaagtccttaaatgacctaatggagctgaaaaccatggcacaagaactacctgacgagcgcacaagcttcagtagccaattcgatcaactggaagaaagggtatcagtgattgaagatcgaatgaatgaaatgaagcaagaagagaagtttagagaataaagagtaaaaagaaatgaacaaagcctccaagaaatacgggactatgtgaaaagaccaaatctacgtcttattggtgtacctgaaagtgatggggagaatggaaccaagttggaaaacactctgcaggatattattcaggagaacttccccaacctagcaaggcaggccaacattcaaattcaggaaatacagagaacaccacaaagatattcctcgagaagagcaattccaagacacataactgtcagactcaccaaagttgaaatgaaggaaaaaaatgttaaaggcagtcagagagaaaggtcaggttacccacaaagggaagcccatcagactaacagcggatctttcggcagaaactctataagccagaagagagtgggggccaatattcaacattcttgaagaaaagaattttcaacccagaatttcatatccagccaaactaagcttcataagtgaaggagaaataaaatcctttacagacaagcaaatgctgagagattttttcaccaccaggcctgccctacaagagctcctgaaggaagcactaaacatggaaaggaacaaccggtactagccactgcaaaaacatgccaaattgtaaagaccatccatgctaggaagaaactgcatcaattaacgagcaaaataaccagctaacattataatgacaggatcaaattcacacataacaatattaaccttaaatgtatatgggctaaatgctccaattaaaagacacagactggcaaattggctcaagagtcaagacccatcggtgtgctgtattcaggagacccatctcatgtgcaaagacacacataggctcaaaataaagggatggaggaagatctaccaagcaaatggaaaacaaaaaaaggcaggggttgcaatcctagtctctcataaaagagactttaaaccaacaaagatcaaaagagacaaagaaggccattacttaatggtaaagggatcaattcaacaagaagagctaactatcctaaatatatatgcacccaatacaggagtacgcagattcataaagcaagtccttagaaactacaaagagacttagactcccacacaatagtaatgggagactttaacaccccactgtcaacattagacagatcaatgagacagaaagttaacaagaatatccaggaattgaactagctgtgcaccaaacggacctaatagacatctacagaactctccaccccaaatcaacagaatatacattcttctcagcaccacatcgcacttattccaaaattgatcacatagttggaagtaaagcattcctcagcaaatgtaaaagaacagaaattataacgaactgtctctcagaccacagtgcaatcaaactagagctcagggttaagaaactaactcaaaaccactcaactactggaaactgaacaacctgctcctgaatgactactggatacataatgaaatgaaggcagacatgaagatgttctttgaaaccaatgagaacaagatacaacataccagaatctctgggacacatttaaagcagtgtgtagagggaaatttataacactaaatgcccacaagagaaagcagaaaagatctaaaattgacaccctaacatcacaattaaaataactgtagaagcaagagcaaacacattcaaaagctcgcagaagtcaagaaataactaagatcagagcagaactgagggagatagagacacaaaaaacccttcaaaaaaatcaatgaatccaggagctggttttttgaaaggatcaacaaaattgatagactgctagcaagactaataaagaagaaaagagagaagaatcaaatagatgcaataaaaaatgataaaggggatatcaccactgatcccacagaaatacaaactaccatcagaaaatactataaacacccctatgcaaataaactacaaaatctagaagaaatggataaattcctggacacatacaccctcccaagactaaaccaggaagaagttgaatccctgaatagaccaataacaggctctgaaattgaggcaataattaatagcctaccaaccaaaaaaagtccaggaccagatggattcacagccgaattctaccagaggtacaaggaggagctggtaccattccttctgaaactattccaatcaatagaaaaagagggaatcctccctaactcattttatgagaccagcatcatcctgataccaaagcctggcagagacacaacaaaaaaagagaattttagaccaatatccctgatgaacattggcacaaaaatcctcagtaaaatactggcaaaccaaatccagcagcacatcaaaaagcttatccaccatgatcaagtgggcttcatccctgggatgcaaggctggttcaacatatgcaaatcaaaaaatgtaattcatcatataaacagaaccaaagacaaaaaccacatgattatctcaatagatgcagaaaaggcctttgacaaaattcaacagcccttcatgctaaaaactctcaataaattaggcattgatgggacttatctcaaaataataagagctatctatgacaaacccacagccaatatcatactgaatgggcaaaaactggaagcattccctttgaaaactggcacaagacagggatgccctctttcaccattcctattcaacatagtgttggaagatctggccaaggcaatcaggcaggagaaagaaataaagggtattcaattaggaaaagaggaagtcaaattgtccctgtttgcagatgacatgattgtatatttagaaaaccccatcgtttcagcccaaaatctccttaagctgataagcaacttcagcaaagtctcaggagacaaaatcagtgtgcaaaaatcacaagcattcttatgcaccaataacagacaaacagagagccaaatcatgagggaactcccattcacaattgctacaaagagaataaaatccaactaggaatttgggaatcctaggaatccaacttacaagggatgtgaaggacctcttcaaggagaactacaaaccactgctcaatgaaataaaagagtatacaaacaaatggaagaacattccatgctcatggataggaagaaccaatatcgtgaaaatggccatactgcccaaggtaatttatagattcagtgccatccccatcaagctaccaatgactttcttcacagaattggaaaaaactactttaaagttcatatggaaccaaaaaaggtcccgcattgccaagacaatcttaagccaaaagaacaaagctggaggcatcatgctacctgacttcaaactatactacaaggctatagtaaccaaaacagcatggtactggtaccaaaacagagatgtagatcaatggaacagaacagagccctcagaaataataccacacatctacaaccatctgatctttgacaaacctgacaaaaacaagaaatggggaaaggattccctatttaataaatggtgctgggaaaactggctagccatacgtggaaagctgaaactggatcccttccttacaccttatacaaaaattaattcaagatggattaaagacttaaatgttagacctaaaaccataaaaaccctagaagaaaacctaggcaataccattcaggacataggcatgggcaaggacttcatgtctaaaacacttaaagcaatggcaacaaaagccaaaattgacaaatgggatctaattaaactaaagagcttctgcacagcaaaagaaactatgatcaaagtgaacaggcaacctacagaatgggagaaaatttttgcaatctactcatctgatgaagggctaatatccagaatctataaataactcaaacaaatttacaagaaaaaaacaaacaaccccatcaagaagtgggcgaaggatatgaacagatgcttctcaaaagaagacatttatgcagccaacagacacatgaaaaaatgctaaccatcactggtcatcagagaaatgcaaatcaaaaccacaatgagataccatctcacaccagttagaatggtgatcattaaaaagtcaggaaacaacagatgctggagaggatgtggagaaataggaacaattttacactgttggtggtaatgtaaactagttcaaccattgtggaggacagtgtggcgattcctcaaggatctagaactagaaataccatttgacccagccaccccattactgggtatatacccaaaggattataaatcatgctgctataaagacacatgcacacgtatgtttattgcggcactattcacaatagcaaagacttggaaccaacccaaatgtccatcaatgatagactggattaagaaaatgtggcacatatacaccatggaatactatgcagccataaaaaaggatgagttcatgtcccttttagggacacagatgaagctggaaaccatcattctcagcaaactattgcaaggacaaaaaaccaaacactgcatgttctcactcataggtgggaattgaacaatgagaacacttggacacaggaaggggaacatcacacaccggggcctgttgtggggtggggggaggggggagggatagcattaggagatatagctaatgtaaatgatgagttaatgggtgcagcacatcagcatggcacatgtatacatatgtaacgaacctgcacattgtgcacatgtaccctaaaactgaaagtataataataaaaaaaaataaggtgtacataataatttaatgtaaaaaaatgaaaatgaagagcatggcaaggaagtctacaaatcagagactggtaatttttcctcttttttgtctctggtgataccaggtgctgtcacaggctctggttctcctttctgccacctcagttccagagtcaccaagaattcagagtagggaatagtttgggccagaggctctcctttctgccacctcagttccagagtcaccaagaatatggagtagcaaatagttcgggccaggggcagagccgggcccaccagtgtcattgagatggccagtagtcctgagaatgtgactgtgggtgccctggctagcggctggacttcccctgtgaggagaactccttcctcttctaaccatgaaaagttcctactataagttccctgtggcttaggagggaactggtgctgtgtgtgtgcttccaagaagagggtaggaacagggggggcctgagcctctggaagctgtcctgtgacctggcaccacagcaggctgtgtgctgcctcctcgtgtgcgcatcacaagaagctccgaagtacaattttattcttttctctcatgtcaaagttcacgctgaaggaatgtctcccattgtctgctggacagctctagacgtatggccctgattccaatctggaggtggcggctattccagtaatagcctcgtctggatcattctggcctccttgaaaactgactcaaaaggctacaaacccacctctaagagtggttttaaaagttttgaagatactggaaaaaccttggaaagtatttggaataaggtataattgtaaccacgccacggaaaaaacagattgttttgggtcatgcctatcccctcatctgaaaaaaaatctcagcaggttgccagacactccttagcagccaaagaaattgtggttttgagctgttgctatttctagaaacttcataaagttaattctgaaggaacagggtggagaccgagaatggaagtgtgctcttttaaggcatttttagcaaccagacagtatttgcctcaggctcaggaagcccagcagggcctgagaatcttgttccactctctctctgcaaggctggccggtgcacggtggccaccaacatcaggcagctcgtgggggatgcacagcatgcgatcgattgtggggcgtgatcgattgcgggacgtgattgcggggcctgatccattgcggggcgtgattgatcgtggggtatgatccatagccgctttccatcctagccgcttctcctttctgcccttgcattcaagtacacgcacagttcttgagctcctagtacactcacggccactgttgagtactggcctcccctttctagctggttttccttgcagttccgttttcatattcacaaacttctgaacttaaatggtcactcagtggccctcactagtgatcatttagcagttcattttgtcacttggctctttttgtttttaccttagaaaacattcttttcatttatttgtttaaaaacttaacgagcttgttggtttctgggttaacaggaaacccaaaacactgcagctgcatggattgaactggacgtgatgtgaaatgaaataagccagacacgggaagacagattcctcatgttctcactcatgtgggtgctaaacattttcaaagtaaactcatggagatagcgagtagaacgctgggtcccagaggctgggaggcatagcagggaggcggggagtaactgggatggctactgggcacaaaaatacagttagaatgatacgatctagtatttggtagaacaatagggtgactacggttaataatttattgtttatttaaaaataactaaaagattggaattggaatgttcctaacacggagaagtaacaaataacttggggtgattgataacccagttaccctgatttgatcattatacatcgtatgcctgtatcaagacttcacaggtaccccataaatatatatataatgattatatacccataataattttttacaaaacaccctaaaacattatggagccctcttgccattctgtactccaaggagtaggacagcagttacaccagtaatccaaagtggatttatttgttgttgtttgttagtgttttgttttagagccaaggtctccctctgtcacccaggctggagtgctgtggtgtgatcatagctcagtgtatcttcaaaagtcctgggctcaagagatcctcccgccgcagcctcccgagtacaggtgtgtgcccccgcacctgggtactttttattttagtttgtttttcgtggagactggatctctctaatgttgcccaggctggttttgaaatcctggtctcaagcgaccctctcacgtcagcttcccacatgctgggattccaggcgtgaaccactgcgcccagctagatttatatttgatgtggatgtgattctataacattttcccacagcatgactatcccccagtggaactgtataaagattaatacatatgacctcaggtaaagggttggcctagaagaattttggggatatagaagattcaccctgagaatatcttggatgcctgggtcctgctcatcaacctgtcacttaactagtatgtgacctctcacctcatggacgtctctgtacccttcctggcctttctcgaaagacttcagcccttccgaccctgtggatcggtgtgtagttacataaggatatgatgccaggtgatgatatgttctctcttcctcacagagtgaaggctgcacagactgagttaggacagcaaatcctggcagattttgaagaagcgtttccttcccagggcaccaaggtactgctttgcgtttccccagtctttagagatgatcaccatccttgccgagctcacgctcaccccagtcaccatgtggttatcattccagtcatgctcgctggcagctgcaaatccttctgctgcaggttcagggtaatgagaccaccctggattttaaatgtccctaggtggtggcagttcctcctctgtttccttccagcctcagaaagagaggatttgtttgggcttaatttgatgtaggtctcaaaccgtctatcttgtatgccctgtcaattccttttttctcatggctgtatttaaaagaaatcttcatgccgcggtgtttttaggattgttacataacttactggttttggtttggtgaaaagacaactgggtggagcatccaccatcttatgtaactctcagagtgatatagtgaggagcctcactgttactgaccataagcctgctcttcggaattcatgcccttgagctctctctggtagcagagctgtttgtgttgtgtctgcaaagcccacagcatttcacttgggagctgttggttgcacttctcatgtaacaagctgccatcctgcttggggaactgcttttagctccacccttccaactgtagcagatgccatcttagcgcctagcatgtgtcggacaggaaagaacccatacgagactttttctctattgtttgagctatttcaagagaaagaattgttcaaggcagaaatatactgaagcacttaggggcaaggagcctcaccctactcggtgggtagagatggggacatacattcatttactgatccaaggaacatttcctgcatctgctctgtaattcaataactggaaatatcttaattattttttctttgtgttccataaaagaaatgtaggaagtaagtgggagtagcggccccagcttttgcccatcactttctataggaagcccgctcctgattttaatgtcttcacattttgtggctgtctgctagtaatcagatgcttatttgtaaagcactttccttggagaacctcatattccttagtcatctgatataactgcagggagggagtagatattggaaagccattagtcctatttattacatgaggaaaatgaaggtcaaagaagtgaaaagggattgtggggatattcgctcatgagaagcactgggctcttcttaggacaaggttagcctcacgtgtactcagctgcccgtttcaggtttttttttttgtttgtttgtttgttttttttttgacggagtttcactctttggcccaggctagagtgcaatggtgtgatctcagcccactgcaacctccgccccctgggttcaagtgattcctgcctcagcctcccaaatagctgggattacaggcacctgccaccacacctggctaatttttgtatttttagtagagacggggtttctccatgttggccaggatggtttcgaactcccaacctcaggtgatccgcccgcctcggcctcccaaagtgctgggattacaggcatgagccaccatgcccagccactcatttcagtttctagaagtttcaggaagatgtggatgaagcccatctttattgtttagaagaggcctgctttatattttttttcccagattccaccgggcagatgaaattaaaatggttctctttaacaacatgcctcccttttctctggcatagtgacttcgtgtgtgtgtgtgtgtgtgtgtgtgtgtgtgtgtgtggttttttttttgttttgtttttagttttcttttcttttcttttttttgagatggagtcttgctccgttgcccaggctggagtgtcgtggtgcgatctcggctcactgcaagctccaccttccgagttcatgccattctcttgcctcagcctcctgagtagctaggactacaggcacccgccaccacgcctggctaatttttttgtatttttttttagtagagatggggtttcaccatgttagccatgatggatctcgatctcctgacctcatgatctgcctgccttggcctcccaaagtgctgggattacaggcgtgagccaccgctcccagcctagttttctttttaaagactatgggcttttcttaaaggccttgtgttactatttccatttcacaagtgggaattaagatttttaaaaatttttccaaggcacaacctagtaaactctttgtaaatgaaaaaatctgaacccgtgaacccataggttttggcatctatgacttctctatcaggtcactttcatcctgaagtgagaattgagaagttagggtgttcagcagatgacataaaaaccactcagcatggagtaagtcaacattttaaaaactcaggtctcaggcagcttatataacactttagaagcgtggaacttcagttgagatgggtggaattggaaagagttgacaaaaaataaagatttagaagaaccttacttatcacctaaagtctattatttttcatatgaggtgagcaagtgctccaaagctacatgcatggctttttagccaagccaggagtagattccaagtgttctttttactgtagtccacttagccagtcatgttcactcagtgacgtactgtaaagaaagtctcagcaaaactttggtcattgaattgcttttggtaacaaagaccttcccgtcgtgatgcgtcagtacagcgcctggtatctttccagtgttcgctcaggtcaggaggccagtatcacagcattttctctttggctgcctttctaggtagttcactattgtgaaacacatgtcgtggcttggaacctggttttatgtgttaagggagaccacactatttggcaaaaacatagcactttaagaacaggaatcccagaggttggagtcagggaagagtggcacatgtggagtgaggctggtggcattccaactcttaggagagaggctggtggcattcccactcttaggcctcttcagcagcatcttgcgacatcagagaccagtggcattctgacttttagatctctttcagttttggtttgcagaaagtcaaatttcccgtgatcattactgcccatttcccaaaatatctcattgcagattcacagggtagtttttctgtcgcttgctgtaaaacgagtgtaaggattccatcctcgaggagcagcaggtaactgacagatccagccacagcagaaagaatgagtgtgaaggagcaggagtaagactgacaatgcgtagagataacaagtagtggctgtgagaagccatgaggtttaaaggttgtttctggcttttcacctggtacatgtttgttttactagagaccaggaggacccagcaatgttctacgagatgcatgtctggttgctaatattctagatcccaggatcaaacaggaaatcatcaaaaagtttattaaacagcatctgtcagagtatctggtactttttcaagaaaaccaagatgtgagtattgaccaaataagatcagatgtaacatttgaattttattgaaacatgagtgctgtcaagcctactaatttagacctcgtattacatgactgtctgacagtgttggttgttgagctgtgagtcctaggggctgagtttatagttcttaaccattttgaggtcactgaccctttggagaaattcagaaacatgcacctgtgcataaaattctgcatatagtttctggaaatgtatagacccctgaaggccaatcatggaccccaggttaaaaacctctggattttgtgtgtgtgtgtgtgtgtgtgtgagacggagtttcgctcttgttgcccaggctggaacgcagtggtgcgatctcagtttactgcaaccttgcctcccgggttcaagcaattctcctgcctccccctcccaagtagctgggattacaggcgcctgtcaccacaccaggctaatttttgtattttttagtagggacggggtttctccatgttggtcaggctggtctcgaactgacctcaggtgatctgctgacctcggcctcccaaagtgctgggattataggcatgagccactgcgcccagccaaaaacctctgaatttttaagtaaaaaatcaagttaaaaaggtagcctagattctttaaaaccatgagaaatacagaggttggttcccttttgcttggctctgtgtttttgcttgtttccttgaactgccatttctacttctaaccactggggtggcttttgatctccaccttcaccaggttgcctggctggacaaaatcgacagacgctatgcctggataaaacgccagcttgtggactatgaggagaaatacggccgcatgtttccacgtgagtggtgcatggctgagaggattgcggtggaattttgccatgtgacaaggtagatgccagttctctactggttctgtggttaatcaaattttcaccatcggttccccagtctctaatggttccatgttgtcctgtggatttgatgccacttccagaccccaccagatgactaatatcatcctcgtaccccacagtggccccaccagctgctccctctgcccccatctttgctctgggactttccgtggtgtagttcttgcctcaagccatctctaccttctccaccaactcaaggcttatacaccagattgacctacagtgattcctctaccccacgttttcccctagtcggtatcgcatgtatcagtgtgctgtgtatatatcccatcatcatttttattttctgacttgctagatagatagttccatagagacagggtagtatctaccttaatgatatagcagacacagaggaaacatttgttgaatgaatttcccactcccaatacagtgtgtatagcctctggatagttcagagcttttatttcaagacagaatcactctgtcacccaggctggagtgctgcagtgatacaatcccagctcactgccacctccatttactgcattcaagtgattctcatgcctcagtctcccaggtagcaaggattacaggtgtgtgtaaccacacctggctcatttttgtatttttagtagagatggggtttcaccacgttggccaggctggtcttgaagtcccgacctcaggtgatctgcccgcccattttagcctcccgaagtgccgggattacaggcatgagccactgcacctggcctgcgtctgagctttccaagcattttaaagaccgtcttttgttcatcctctctacgttatccatgagtgtagcccaaggacagatagtctctttatattaaaaaaacccaaagcccaggaaggttaaatcagtatatctatgacaaagctaaagccagagtcagacttttttttttttttgagacggggtctcactttgtcacccagactggagtgcagtggtgtgatcatggctcacagcagccttgacctcctaggctcaagtgattctcccacctcagcctcctgagtagctgagatgacaggtgtgtgccaccacaccggctaatttttgtgtgtgtattttttgtagagacaagagttttgctgtgttgttcgggctggtcttgaactccttttattctttatttgcggctagactacaacagtgttggtaactggttcttattagttatatatttcctcccagtagtacacagttagatctaatgctgggtgaaaaagagaaaaaaaagcccatatctagcataactcaaccaccttttcccataatccatggccgtcttttttattaaaatcatggaaagtaaagtcaaattgcatgtttcaaacacattgtggggcaaaagtgttttaagggatattggcttttcttaaaatagattttaccttttagagcagttttaggttcacagcagaattgagcagaagacacagagagttcccaggtgctcccggccccacgtgcatagtcttccccatggtcggcaccttccgccagagcgatgcatttatcacagctcatgaaactacacggacacatcatcattacccagagtgatggtccatagttcatggtagtgttcacgcttggtgttcacatacattctgtgtggcttttttttttttttttaagagatgggggtctcgcagtgttgcccaggctggagtacaatggctattcacaggcatggtaatagcgtaccccagccttgaactcccgggctcaggcagccctcctgcttcagccacccaagtagctgcaactacaggtgcactgagctccattctgtgtggctgttattctaagaaacacattgggccaggcttggtggtttatgcctataatcctagcatttcaggaggccaaggcaggtggatcatatgagcctaggagtttgagacaagcctgggcaacatggcaaaaccccatctctacaaaaaatgcaaaaattagctggtcatggtggcaagcacctgtaatcccagctactagagaggctgaggtgggaggattgcttgagcccaggtcaaggttgcagtaggccattatcatgccattgcactccagccctgggtgacagagtgagaccctgtctcaaaaaaaaaaaaagaagagagagaaagacagagaaggaaggaagtgaggaagggagggagggagggagggagggcgagtggaagggaaaaagaaagaaagaggaagaaaaaaaaagaaacacattgactcctgtagatttagagaaccttttagcattggtttaagatgagttgagattgtcaccttctaaatcccaattaacaaaataaagagtgaattccttgagaaactgttagctaattctttttagcctacagttcagcagacttgcaaaccagctcagtgagaaatggagcctgggagaggctggacgtatgctagagccagcacgtttcttgtgagcgccagtacctgccattgttgtctcggctaatggcagtgttgctgccaagcttctattgttagaattttggctaaaatcctacagatacatcattctcaaataaactcagagactctttgtttcattttgtcatttatttgtgtgagaagatggtagcttagtccttactaagaactcacatgtccctgttcaccagcaactgagcttctgagatggaacgtttgagtgagagctgcacaggagcttctcgggcagggaccagctaagcgtgcttgccacttttcccgcagggatcctgtcccttgcgtgtgtttccaggactcctgctctctagttgaagagatgattattgggccctcaggaagagggagggctttataattcagtaattaatgacttgtgaaattatataggctatatacactaataaaaaattaggtgctccatatgtattattatccaattattaaactgttcaaagatacaggcaacgtagtaactatgtaaccaaattactggtggctcacacctataatcccagcactttgggaggccgaggtgggcggatctcttgaggtcaggagtttgagaccagcctggccaacatggtgaaacactatctctactaaaaatacaaaaaaaaaaaagaatcatttgaacccaggaggtggaggttccagcctgggcgacagagggagactccatctcaaataaataaataaataaataaacaaacaaataaatataagtatatatatatcatccatgacccctgatttttttgcctggtggataatttcaccttaaaaatcttgtttagaatatgtatttctattccccaggttttagactaaggtggtaacagacctcagggtttgaaatgaccacatacattttttttttctgaatataagctaaggccatttaccttatctctactgaatgaatgatcagcttgtttgatagtattcttatctctttgttttgaagggcagaacttgccaagattatgcgtaccagagcgaaggaaattgaagtgaaattgcttctttttgctattcaaagaacaactaactttgaggggtttcttgcaaaacgcttctccggctgcaccctgaccgatgggaccctggtaagaccttccctagggagctgccacgtgaaatcagtgggttgggtggttgggattcagggtttcactgtatggtgactctatccattggcttcggtgcttaacccctcattgcagtgatttcactgagctgctgggaaagtgatgatacagaacactctgtgtggatttattgtttgtctcttacgcagtacatcatgtttctagaatgccctgtcatcatttttcttaagtattgatcccattttacagactagtaattttgtgagtcagaggccttactcagtcacaaataccttatttctttatcagttatcagatttggttacaattaggatatgtttttactttagggtttaccttttaacatctctggtgaacaaactaggtcaatgagtctctgtaaaccccaaagccaggtatacaggcctggggactacgtgcctccattggaaaggtggaacatagtactgccggttaaacgtttgtctctgtgtagtcaaagaccaggtccaaattttcactccggaaacctcttctttttggtctgatgcagtggctcacacctgtataatcccagcactttgggaggccaaggcaggattgcttgagaccaggagttcgagaccagcctgggcaacatagtgagacctcatccctacaaaaaaaaaaaaattagtcgggtgcaccccttagtcccaatcacttgggaggctgaggcaggaggatcacttcagcccaggagttgaggctgcagtgagctatgatgagtgacagagtgacaccctatctctaaaaaaaaagaaaagaaagagaaaggagtaaacctcttctctttggaggcccaggctccctgctaacacatcaaggtgctctcttcagatttcctgtccactgggaaaccaagtgactctgttctatggtaatttctgtttgcatcattacatatgcgtagacattgagctccttgaatacaggaattgtagctgactcatccgtctcctcgagtcgtgcagagtgtacacagaacccatgcaggcaggaatggaaggggaaagaagaaaggagggagggaagaagaaatccaagttgagagaatcatacctttgaattttctttagagctagatttgttttttttttttaaactgcgggtaacaatagagaagcaaagtgatttagtagcaaaatccttggaccagcagtcaagacttgtggtctaatcccgattctgctgtaatgtagtgaactgccttccctgttaaatgagaagaaaagactatcctttatttttttatttttttgttttttcattttgttttttagacagagtcttgctctgtcagcaggctggagtgcagtggggcgatatcggcccactgcaacctctgcctcccaggttcaagcaattctcctgcctcagcctcctgggtagctgggattacaggtgcacaccactaagcctggctaatttttgtatttttagtagagacggggtttcaccatgttgaccaggctggtctcaaactcctgacctcaggtgatctgcccgcctcggcctcccaaagtgctgggattccaggtgtgagccaccatgcccacctatcctttaataacagaatattagggagactaaataagacataaaacccaaaagccatgaagaaaagtactaaaaggtttaacaacataaagagaacaacgttcttttggaaaaagagaccagaaacataatcaagggattaaaaaacagttgaagctgcatgacacaaacgattaatatctagcacatgtaaagaactcctaaaaatccataaggaaaatacgagtaacccgttagaaaaatgagtacagagtcagacagacgattgactgaagaaattcagttggctaataaacatgaaaaaaaagaaaacaggatatttttcctacatcaggtttgcaaacagaaaaaaattacaagactaacagtacaggattttagggctagtatacagcttgatacaacctttttggtgcataaattgtcattatcagaactttcagaaatgtaaatatgcatgtcctgtcaagcaacaattttacatctaaaccagaagtctaaaaaaaaatccatacatgtagaggaagatgcacaaagaaagaggtgaactgcagccttaaaagcaaaaggcttggctgtgtctgtaatgtttattattgaagatggttaaataaattacagtgcatccatactgtgagatgctacacagcagtttaaaagtggtagaacgggggccggacgcagcagctcacgcctgtcatcccagcactttgggaggtataatgtcttttatggaaaaagtaaaaagcatgtttatgtgtgtaaatgtataagaaagaggtctggaaatggtaacagtggatgtctcttgggaaggaagttggagtgagagtaggtagagaagcaaggaaatatttttttccatttactctggtatagtttttttggaaattttcttatacaaatgcatttacatactttgtgtgtactttaacaaagttatttttcaattgttttaaaatgagagagatgggccaaatcagtgatttccaaatcctttcttgtaacaaaatctaatgtagaggccgggtgcggtggctcatgcctataatcccagcactttgagaggctgaggtgggatgatcacttaaggtcaggagtttgagagcagcctggctaccgtgacaaaaccccatcacgactaaaaatacaaaaaattagtcaggcgtggtggtgggtgctgccaaggttgcgccactgcactccagcctgggcgacagagtgagactccatctcaaaaaaaaaaaaaaaatagaatgtagaatctgaaacacccatagctgtcatgctttgaacatccacttggtgacccacgctatattaggtgcgtttacctgcagtcagtcactgtgcttcatcagccataggaagtaggcgctgtgctcatttgaaacttactccaggccacggagctaatgtgtaagaccgtgaaactgagctactgtggttgaagccgggggcaggctgggacttgtacctggagtcccactcacttgttcaaccttcacctctgccaccttctctagctcctacccttctggtcctaaaaccctgagacttcagtgcaattccctctttgtcccatgagaccagcctcagagcaggtgaagcgggtgaatcgggctggtctttagacagggtggagcaggtgaatcgggctggcctttcaggcaatggactgcagagcggtggtggcagcagcccaattttgaggccagaccacaaggtcctgcctacttgggctcactcacgactttattagaataaaatgcagctgaaaccacaaagcactcttttcctacttagcacatcaaaaatatgtatacttctctgcttgctaactaatgttcaatattgatttctttttagtaacaagggaaaaaaatgggtcacaaaacaggtgaaaatagccttaaagaaaatgcaggtcagaaaaggaaatactagcggggcgtggtggcgcacgcctgtagtcccagctacccgggaaatactagcggggcgtggtggcgcacgcctgtagtcccatctacccgggaaatattagcggggcgtggtggtgcacgcctgtagtcccagctacccgggaaatattagcggggcgtggtggtgcacgcctgtagtcccagctacccgggaaatattagcggggcgtggtggtgcacgcctgtagtcccagctacccgggaaatattagcggggtgtggtggtacacgcctgtagtcccagctacccgggaaatattagcggggtgtggtggtgcacgcctgtagtcccagctacccgggaaatattagcggggtgtggtggtgcacgcctgtagtcccagctacccgggaaatattagcggggtgtggtggtgcatgcctgtagtcccagctacccgggaaatattagcggggtgtggtggtgcacgcctgtagtcccagctatccgggaaatataagcaggcgtggtggtgcacgcctgtagtcccagctacccggaaaatattagtggggtgtggtggtgcacgcctgtagtcccagctacccgggaaatattagcggggcatggtggtgcgcgcctgtagtcccagctacccgggaaatattagcggggcgtggtggtgcgcgcctgtagtcccagctacccggaaaatattagcaggtgtggtggtgcacacgtgtagtcctagctacccaggaaatattagcaggcgtcgtgggcacctgtagtcccagctacccgggaaatattagcaggcgtcgtgggcacctgtagtcccagctacctgggaaatattagcaggcgtggtggtgcacacctgtagtcccagctacccgggaaatattagctgggcgtggtggtgcacgcctgtagtcccagctacccgggaaatattagcggggcgtggtggtgtgcgcctgtagtcccagctacccgggaaatattagcaggcgtggtggtgcacacgtgtagtcccagctacccaggaaatattagcaggcgtggtgggcgcctgtagtcccagctacccagaaaatattagcaggcgtggtgggcgcctgtagtcccagctacccgggaaatattagcaggtgtggtggtgcacacgtgtagtccctgctacccaggaaatattagcaggcctggtgggcgcctgtagtcacagttacccgggaaatattagcggggcatggtggtgcacgcctgtagtcccagctacccaggaaatattaacaggcatggtggtgcatgcctgtagtcccagctacccaagaaatattagcaggtgtcgtgggcacctgtagtcccagctacccgggaaatattagctgggcatggtggtgcatgcctgtagtcccagctacctgggaaataatagcggggcctgatggcgcatgcctgtagtcccagctacccaggaaatattagtggggtgtggtggcgcatgcctgtagtcccagctacccgggaaatattagtggggcgtagtggcgcacgcctgtcgtcccagctacccgggaaatattagtggggcgtggtggtgcacgcctgtagtcccagctacccgggaaatattagtggggcgtggtggtgcacccctgtagtcccagctacccaggaaatattagtggggcgtggtggcgcacgcctgtagtcccagctacccgggaaatattagcaggcgtggtggtgcacgcctgtagtcccagctacccgggaaatattagtggggcgtggtggcgcacgcctgtagtcccagctacccgggaaacattagtggggcgtggtggcgcacgcctgtagtcccagctacccgggaaatattagtggggcgtggtggcgcacgcctgtagtcccagctacccgggaaatattagtggggcgtggtggcgcacgcctgtagtcccagctacccgggaaatattagtggggcgtggtggcgcacgcctgtagtcccagctacccgggaaatattagtggggcgtggtggcgcacgcctgtagtcccagctacccgggaaacattagtggggcgtggtggtgcacgcctgtagtcccagctacccgggaaatattagtggggcgtggtggcgcacgcctgtagtcccagctacccgggaaatattagtggggcgtggtggcgcacgcctgtagtcccagctacccgggaaatattagtggggcgtggtggcgcatgcctgtagtcccagctacctgggaaataatagcggggcctgatggcgcatgcctgtagtcccagctacccgggaaatattagtggggcgtggtggtgcatgcctgtagtcccagctacctgggaaataatagcggggcctgatggcgcacgcctgtagtcccagctacccgggaaatattagtggggcgtggtggcgcacgcctgtagtcccagctacctgagaggctgagacaggaggatcactttagcccagaaggcagaggttgcaatgaactgagattgcaccactgcactccagtctgggtgacaaagtgagactgtctcaaaaaaacagaaaaggaaaggaaataggaacagagatcccactgaaggaatcctgagtttctcctgagaagtatgaggttggctttagcagccccctgattcctcttgctggctctcctctcggaccttcccaagccatgctcctgcctggtttcaagcgtagatatatgtggcactggattcagccctacggagatctgcccggcgacaagcatgagggttcagcattgagcacaggccccaccctgggagtagccccctgagctcccacggcctctggctgggcagggtccggagagcatcaggacaggctctgtgagctggtaatccagataaccggacgggaaataggtcccagtgaaggatgcttgaatgacattcttgccaagcacttgttttgagccattcttcaccctctctggctgggccctacttcctggtgatttgtcttttacatttagggagctataggaccacagaggaacaaatggccctgttgcatctgaggaccagggtagcctgtgaacctgggtctgtcccaggacctctccaaggaaaaatcccccaaaggccaaaagtggtaagggaacgagggcagggaaggcccttctggacaagctgaggcagctgaacagggtaaccacgtagagaccatgaaaaactgacaggagcttactcaagtttgcaaagacaatgctttattgtaaaacacaggtacaggactgtcagaatggcagttggccaactgtcagacaccttctgtcccgggaggactgggctgggggtactggtttctcagggcagcacagcccctttctgcctgaactcactcggccagggccaagctcctggcctggagcccagtgtctcctggccgaggtggtgctctgtggtggtggtcaggggtcagctaggaacacttgagcctttttccccagctccttcctttttggttttcatatttgaaatgttttggcagaactggtctttaaatcatcccctcttcattgttcagttgttgctctcctctcctctcaagtttgcagagtttcaggttctaaatccttagccagaaaagcctgatgaacaccatgagttctttctttccctctctatttagtcagctctcctctccacagacttctctaaatccttcagcttctttaattcaacttcgtcctcctaccctattctttgtgccaggtatcacgacctggcagttattctgcattccaaatcctgaaaatggctgtctgatatccttcaagggttttcccttaaagataagtttctaggaaggcaacagaagccctatggccactttacccaggtgggacgggccttgaggaatcggttcactgcagctctgctgtgaggagacgtgaaggctgtcactctagctgatgttcacactgagcctggtccccaccatcatctcattgtgggccgtgcacgaccttcttcacctttattctgcgaccctcagtggcagggaccttggtgaattcatcatggctaccgaccatgctcccaacgcaaagcaccgggaaggggctgcctgggcaaggccaggagttccagctgtcctgacccccagtctagctgctgggtaccctgcctggagatatgctgctccctggcccctgaccccttccccatgctaccttcctttcaggatacactctttggaaactcctttttggctaccattttgtttcaaaataccagaataaattgtgaaacgaaccaaggtatatcttgataccctttgatatatgccagattttatagaaagttactgaattcctcagaaaggtgccacaaaacaggtaagatgtcagccaaggagccaaaacggccagagactctcccttgctgcccctccctaggctgtacgtcatccccaccctacccccactgccgccttcactgtatcattccaaacctctccagtccttggtgactggcagtgaaacagtgaggatgagcttgagagtgtggccagctcgcccggaagacaagacctgccacagctcagctcctcctgacccatcactcctgacttcagtgggatgcatcatccttggctctttttcaagagctgtgacttcaacatttgatagaactttagactgaaagagcctcagggacaggcttgttgcttaaccagtttcacgatgtcctgtgctgtaactgttacttgaggaggtgagctgcctgtgcttttcccagttgcctcaacttctgaccctttaggaggaattcaagagagtctataaattaaaatgccttgaaattaaaagagaatgtctggatgtgatgtaactggatccatatgcattattagtgacttgatgattagattcaaggtgagcaaatgacattcagccttctgctgaaagcagaaaagcagactagatcggattagctttttataactgcctcactgggaggtttttgttttgttttttgttttttttgtagtaataaaattaaaaatgttccccttttatgcagctggatttcccttcctcttgaccactgcataagttgccttttgaaacagacttgtcctttggcttataggggcctttacttccccagtttttagaattacattctaaagatagaagctatatgggtacaattgtcagccatggaatttgagtgtaagagcgtttgcaaaaggctcacgactcatgaaagaccacccagcatgtctcactctacaccctggtcttccggcacctgcatgagggagactgtgtaaggaacaggggcaggttttccagctctgccacagcttgaggacatctgtctccgacagtgacagattcccccgcctcatgcactcccttcagcgttggaaaatattttatggatgctttactggtgctaaagaaatgtattcttccatttgaataatattgcaagggacgattaacttctgtttctgagaagagaataatacagggtcaggatagaaaatttggaaattatggcgagaatagagaagcaggaaaaaagtcatccaaatcagagatgaggatttgggtatattctttctatatattttacatggttgaaattgtatttttttaaatacagttttctctgcctagtttttaaaattgagatataactcatgtcacgaaatgtcacatgaaatttatcgtttaaagtatacagttcagttggttttcatatattcataagatgatgccacgatcccagctgtgcaactccaggacatttctgttaccccagaagaaatccctccttagcaggcaggactttcaagttctctttccccagtcctgggcagttacgaattgacttttgtctttacggatgcctgttgtggacacttcacataaacggatgctacgatgtgtggtttttgtgtctgccttccctccctctggacagtgtctgcgagccttacccatgatgaggtgtgtgtcagtgcatcattttgatggctgaatagtgcaccgttgtgtgggtgatgcacatattgttgtctcttccatcagctgtggacattcgggtggtttccactttttcactgtgtgaatactgctgtgagtatctgtacaggttttcactgtgtgaactcactgtgaatatttgtacaggttttcactgtgtgaattcactatttgaatactgctatgaatatctgtacaggttttcactgtgtgaactcactatgtgaatatttgtacaggttttcactgtgtgaattcactatttgaatactgctgtgaatatctgtacaggttttcactgtgtgaactcactatgtgaatatttgtacaggttttcactgtgtgaattcactatttgaatactgctgtgaatatctgtacaggttttcactgtgtgaactcactatgtgaatatttgtacaggttttcactgtgtgaactcactatgtgaatatttgtacaggttttcactgtgtgaattcactatttgaatactgctgtgaatatctgtgcaggttttcactgtgtgaattcactatttgattactgctgtgaatatctgtgcaggttttcactgtgtgaactcactatgtgaatatttgtacaggttttcactgtgtgaattcactatttgaatactgctgtgaatatctgtacaggttttcactgtgtgaatactgctgtgaatatctgtgcaggttttcactgtgtgaactcactatgtgaatatttgtacaggttttcactgtgtgaattcactatttgaatactgctgtgaatatctgtacaggttttcactgtgtgaatactgctgtgaatatctgtacaggttttcactgtgtgaactcactatgtgaatatttgtacaggttttcactgtgtgaattcactatttgaatactgctgtgaatatctgtacaggttttcactgtgtgaactcactatgtgaatatttgtacaggttttcactgtgtgaattcactatttgaatactgctgtgaatatctgtgcaggttttcactgtgtgaactatgtgaatatttgtacaggttttcactgtgtgaattcactatttgaatactgctgtgagtatctgtacaggttttcactgtgtgaactcactatgtgaatatttgtacaggttttcactgtgtgaattcactatttgaatactgctgtgaatatctgtacaggttttcgctgtgtgaactatgtgaatatttgtacaggttttcactgtgtgaattcactatttgaatactgctgtgaatatctgtacaggttttcgctgtgtgaactcactatatgaatatttgtacaggttttcactgtgtgaattcactatttgattactgctgtgagtatctgtacaggttttcactgtgtgaactcactatgtgaatatttgtacaggttttcactgtgtgaattcactatttgaatactgctgtgaatatctgtacaggttttcgctgtgtgaactatgtgaatatttgtacaggttttcactgtgtgaattcactatttgaatactgctgtgaatatctgtacaggttttcactgtgtgaactcactatgtgaatatttgtacaggttttcactgtgtgaattcactatttgaatactgctgtgaatatctgtacaggttttcactgtgtgaactcactatgtgaatatttgtacaggttttcactgtgtgaattcactatttgaatactgctgtgaatatctgtacaggttttcactgtgtgaactcactatgaatatttgtacaggttttcactgtgtgaattcactatttgaatactgctgtgagtatctgtacaggttttcactgtgtgaactcactatgtgaatatttttacaggttttcactgtgtgaactcactgtgaatatttgtacaggttttcactgtgtgaattcactatttgaatactgctgtgaatatctgtacaggttttcactgtgtgaactatgtgaatatctgtacaggttttcactgtgtgaactcactatgtgaatactgctgtgaatatcagtacaggttttcactgtatgaactcactatgtgaatatttgtacaggttttcactgtgtgaattcactatttgaatactgctgtgaatatctgtgcaggttttcactgtgtgaactcactatgtgaatatttgtacaggttttcactatgtgaactcactatgtgaatatttgtacaggttttcactgtgtgaactcactatgtgaatactgctgtgaatatcggtacaggttttcactgtatgaatactgctgtgaatatttgtacaggttttcgtgtcagcgtgtttcctattcttgtgagaatatacctgagtggaattgctgggtcacatggtaaccctaggcttaactttttgaggaactgcaaactgttttcgaagcagccacacggttttacatttctacccacaatgtaggagggtccagtttccccatatccttgctgacgcgtgtctcctttgttcccctaattatagccattctcatgggtgtagagtagtatctccttgtggttttcatttgctttttcccattgactagtgacattgcacagcttctttaaagaaatgtctattcagctgggtgtggtggctcacgcctgtaatcccagcactgtgggaggccgaggtgggagcatcacctcaggtcaggagttcaagaccagcctggccaacatggtgaaaccccgtctgtactaaaaatacaaaacttagccaggcgtggtggcgggtgcctataatcccagctactcgggaggctgaggcaggagaatcgcttgaacccaggaggtggaggtttcagtgagctgagattgcgccactcatgtctcaaaaaaaaggaaatgtctattcacattttttgcccattttttagttggattgtttttattgttgagttgtaagagttgtttacacattctagatatattctataacttttttttttttttcttgagacagagtctcactctgttgcccaggctggagttcagtggtgagatctcggctcactgcaacctctgcctcctgggttcaagcaattctcggacctcagtctcctgggtagctgggaccacaggagcgcagcaccatgccaggctaatttttgtattttttgtattttttttttttttttttagtagaggcggggttttgccgtgttggccaggctggtcttgaactcctggcctcaagtgatccacccgcctcgacctctcatagtgctgggattataggcgtgagccaccatgcccaggctttataacttctttagatattttatcatgtatcagacatatgatttgccaatgttttctcccatctgtgggttttcactctcttgatagtcatttcacaggatttccgttttaatgaaggttttttgttcttgcttgtgtttagtgtcatatccaagaaactgttacgtaatccaaggctacagagacttacctaggtttcctcctaagagttttatagtttcagctgctacatttatatctttgatccattttgagttaatttccatattaactcacacacacatatgaaaatatgcttcatatgtcacagcttaagttgtttctcaactactacagaaagattttattctatagatactcagtgattcccctaattattcttttctcgtaggacccttagttttttctcacttttataaatagggctatatgaatatttttgtctactaatttgtgtgtgtgtgtgtgtgtgtgtgtgtgtgtgtgtgtgtgtgtgtgtgtgtgacggagtctcactctgtcgcccaggctcgagtgcagtggcgcgatctcggctcactgcaagctctgcctcctgggttcacgccattctcctgcctcagcctccgcgtagctgggactacaggcgcccgccaccacgcctggctaatttttttttttatatttttagtagagacggtttcaccatgttagccaggagggtctcgatctcctgacctcgtgatccgcccacctcggcctcccaaagtgctgggattacaggcgtgagccaccgcacccggccttgtctactaattttatatgcatttgagattgtttttttcctctcttctcttctctcttctctcctcttcgctgtctcttacccaaagcagtgagatgattttcttacgacactagtggaattatcggctcaagttgtgagcactttcaatttcagcctctgctttaaacatctttctgttcctcttcctttctgttcttccaaatgcagttaagatttaaaagtagtccctgcttgtttcagtgcatctcacagtgttaatgtgccatgcctaatgtgaaggggtaactctgccaaatagaaaaagcaaagcaatctgaattctttttttttaattacacatttctacttctaagtatatgcccaagggaattaaaaacatatgttcgtatgtcttacacaaatgttcatagcaacactattcacaatagccaaaaagtagaaacatcagtagacaaggaataaccaaaacgtggtctgtccgtacagtggaatattattcacgtaaaaggaatgaagtgctgatacgtgccctgacctgggtgaaccttggacacaccatgccgagtgaaagaagccagacacagatgtcacacattatatgattccatctataggaaatacccaaaagaggcaaatccatagaggccgatggggttgggaaggggaagactgggaagtaacagcttcccagtaacaggtaggggttgcttttgggggtgaaaaatgttctggaattggtggtgatggctgcacaaccttgtgaatgtccgaaaaccactgaatagtaaatcactttaaaatgttgagttttatgtgacatgaattacatcacaatttagaattaaaggctttagaagatagtgtatgagtttagttataaatcatctttactcttcagataaatattctgtcaaaaaaaaaaatgagcagtgggccgggcataatggctcatgcctaaaatcccagcgctttgggaggccgaggtgggcaggtctcttacagccaggagtttgagaccagcctgggccacgaagaccctgtctctaaaaaaaaattttaaaatgagcagggcgtggtagtgtgcacttgcattcttagctactcaggaggctgaggtgcaagggtcacctaagtccaggagttcaagactgcagtgagctgtgattgcaccactgcacttcatcctgggtggaagagtgaggctctgtttcaaaaaaaaaaagaaaagaaaagaaaagaaaaaagcagaaatagctatatatgcctattaaaaactcaaatagaaaaaaaaattttaaataaacatctcttcttaactactgtatatccctccccctggaggtatccacactgtttaattctttggggtatatttttgacgcttctgcaagcacgcttgcacacatatacgcaggctttttgttttgtttacagaaaatagaaagtgttgcccatgtttctgaagaggattttattgagggcctttcatctgatcagcatttacccacttatatttttcaagcttccctctttgttcagggctttggaaaagatgagaaattggatcgggaaggcacttagggtctagtaggagaaagaagtctgtacataactgttgcaatagaagaagtggacatggcggtagcaagagagtagccccagaaatggtggacaccaagtgtgtgaacccctgggcttgcagtcctgactgtcagctaaagccccgcagccatctctttaaggaccaattaggaattgggctggagtaaagcatttatggagtgagaaatgcagaaactgaggaactttcatctcacaagcgaaagctttcccctctagggaaaggaagagtcttaaatttcagagttccttctttgataattcgatgtgtccagctagggcctcacacagggatttgtgtaggcagacgagatacggatgtactgctgactgaagccagactttcccttcttgacagtgaattagacagcctgactgtcctgtggtctgaactgttttgaaggtgctgggaatcccctgtgatttaatcagtagggattaacttgctatatgaagaattttgctttcctatatcggcttgaaatcaactgtcatcatagcaaaaagaatgaattctttcaaaattggaagtcattcacttcttggaaatttttggctttatttagcagcctcagagttcatgaaatatgtcctttgagttactgacaatctaaccccaaagttgtaattctctgtggcctgtgacagctgcaaagcaagcctgagaagcgtgatctgtgtggctcttagcacagaaggctgcgttatgccagtgatcgctccccacaaggacttgttctttcatcttagcaagtcagtctgagcagtaatgtagccctctaactagcgggaatgcatatccacaccttagggttttaggacttttatcaacagggaggagggtggtatgtgcgttgttgtagactggggaagaaaggagcagctccgtgtgcctttccacttagaaagtgcaaagttgatgggccctttgcttttatttcttagagagatcccaaagagacaaagtagttgggacgaggctccacttatggttaatagaaattcttttgacaagacttttaagcctgcatgcccacgttttctgtgagctgctttattaagagaagcacaacagttttgccttgtttcgtagctcaccctattaattactgctcaaagcttccccttgctgagccttgccctctgtgccagacagcatgttaagctgctgtatatattcagtcatgcattgcttaacagcaggaatatgttctgagaaatgcatcattagtttcatcactgtgcaaacctcatagagtgtgcctgctagaacctactccagctgtccccaacctttttggcaccagggactggttttgtggaagacagtttttccagaggtgggggtgggggtgggagtgcaggggatgggggtaggggatggtttcgagatgaaactgttctacctcagatcatcaggcattggattctcagaaggagtgtgcaacctagacctctcatatgagcagctcacaacagggtttgcctatgagacctgacaggaggcggagcccaggcagtcatgctcactcactgctgctcacctcgtgatatgcagcctggttgctaacaggccatggactgtggcccaggggttggggacccctggcctactctattgtatggctccattataatctagtggaaccgccttgtaccgtggcccgtcatggatggaaacatggtgatgtggtgcatgactgtgtagctcacgcctgacacgcacgcatcatcccatcctcatggcagcacgtaactgtgtagctcacgcctgacacgcatgcctcatcccatcctcatggcagccatacgaggtaggtattcctatcccttcacattgcaggtaggagaactgaggctagaagttaaacagcataccccatggtggaacctggactcgaacccgggtctgtcagatacggagcctgtgcccttgccactacacgagggtgccccatctcagttaagggcaacatcagccgtgcagttgctcagaccagaaagtgactgtcccttcactcctttcattccctcaccctcgttctcactctctcagcaaagcctcctggctctgcctcctaactgtgccccaaatccgatggacacttttttctatcgtccatcaccagcttagtccagttccccatcagccctttcctggaacactggcttagtccggttcccatcagccctttcctggagcactgtagcagcctcttaaactggtttgcctgctgtcattataatccattcccctacagcagtggaatatttttaaaatccaaattagatcacatcacttcgctgttgaaaactaccagcgactgcccaattgcagtgagaagaaaaccgacccttaccatggcccacaaaaggctgcgtgatggggctcccgccacccctcttaccccaggcccccatcttcctttctgtccctgactcaccaatatgatgcgactcttgccacccctcttaccccaggcccccatcttcgtttccgtccctgactcaccaatatgatgggactcccgccacccctcttaccccaggcccccatcttcctttctgtccctgactcaccaatatgatgggactctcgccacccctcttaccccaggcccccatctttgtttccgtccctgactcaccaatatgatgggactcccgccacccctcttaccccaggcccccatcttcctttccatccctgattcaccaatatgatgggactcccgccacccctcttaccccaggcccccatcttcctttctgtccctcagactcaccatatgctttccagcgtctccaccgggtctccctgctgagaacacccttccttgggttttgcctgagcagttccttcttactcagctcagccgtcatctcctcagagaccttttctgatgaccctgtgtgtagaagcactttcccaccctcatccccagctcatcccactccctgagttttcttctcaccactacagtgccgcctctctaatccatcttcctcacttgcatccctggtgcacccaagagtgcctggagcagagtggatgcccagtacatcattgttgagtgagcggcagacacgtgctgttccctccgccctccacccctcatatatttcactctgaggcatccttcagctctggctcagacatcttttctttagggacggctgcggccctctgttgcacgtttccatgacgactgcttttccttcctggcccttctcactgtttgtgtgactgttggattgaaggctgtctcccccagcagactctaatctccatgagggcggaggctggcctgtctttctcactgctctactcctagggccaagcatatccctttgttgagtggatgagggaaggaatgaatcacttttcctgtactaacttggtccacatgtggaatgcatgtgccacaaatgagtgagctaggagctccttgatgtccacaactcccctcatgttaatagaggacgggcatggtggctcacgcctgtaattctagcactttgggaggctgagacagatggattgcttcaggtcaggagtttcagaccagcccaggcaacatggcaaaatcccatctctacaaaaaatacaaaaattacttgggtgtggtgatgtgcacctgtagtcccagctactcaggaggctgaggttggcccatgctcactctatcccagatggtgacactgagcgagtggcctgtgctcacctgcctcagatggtgcctgcttcttcagggctgcccgttaggttcgacttcttcctcccctctccgttttcttgatgctttacaccggcgagagtaggttcaacttcttcctaccctctgcgttttcttgatgctttacgccagcgagagtaggctcgacttcttcctaccctctgcgttttcttgatgctttacgccagtgagagtaggtttgacttcttcctaccctctgcgttttcttgatgctttatgccagcgagagcagagcccgggaacgttctcagtccacgtcactgacatctgctgtttgccatgatttccaataacacattatgttttaaaaacgaggcccatctttatgtaattgtgaggtgctgttatcaacccaatagacttagcaatagatgaggggcatttagttcaaaaactcaaattctgtgtctgtcactgaatgattttgatcaaagcttttaacttcagttagctgacttgcttttcatatctacaaaggaccaaaagacttagaatcatagtgactcagctcaacagcataatcccagagcccactgttaagccagtggaatcaggagtctaatgctattacctaatttaatttttttatggttgttgaagattaagcttggtagattccctttattactattcctctctctctaaaatatcagcagcccttaagaagacaactcaagcttagaaatactgctttctaacaagagctgtacatttttaaggattttttttctctcatgttaggtaaagaagccaaagtttggagtgtgcaaatgtgaaatacttgcttgggtgttagaccatattgtttatcaccaggataccacaaaaaccatcatcttactactgattacctcgagctaatgccatcaccacaaggctttgtcatgcaccgaggctgtatctgtccacatcacttgcatccaagtgttttggccaaaaaataagcagttattaaatgactgttagcagtattgtcttaaaccaaaaaccagacgcaggtgtagtgcttttgtgcaatgtatttattttattgtattttatttttgagacggagtctcgctttgtcacccaggctggagtgcagtggtgccatcttggctcactgcaacctccacttcctggattcaagcaattcttgtgcctcagcctcccaagtagctgggattacaggcgcctaccaccacgctgctaattttggtatttttagtagagacaggctttcaccatgttgttcaggctggtcttgaactcctgacctcaagtgatccgccgcctcagcctcccaaagtgctgggattccaggtgtgagccactgcacccggcctttgtgtaagttttggttttatttttgtttgtaatagcttcagatggtgtcctggcacttggcaaagttattcacgctatagtccatctgctgtcccttttggcttagagattaattcagattgacccactggtattggctaaaataccaagtacatttagaaactccctctccattaacttctcgtctccagagagccatgccttgcccccttccctcgtccccagcaccaagcagtccctcttttctgtttgtccagttggcctcctttctgctaaagccttcagctcccaggcataaacaacatctctaggtgaaaactgtaaaggaattccagagagctgccttgattctgtagttgtactggaattaacgtcatcagtgacccttgtgtgtatcatgtgctgcttctagggtttcacatttgatcctccagatagtcctgtgactacatcctcattcagcagatgaagttactgaggctcagagaagctgggtgatagggccagtgccgcacggttggagctacagctaccatgcctcctgcctgcagccttcccactggcccatgtttccactccgtgatgtattttgaaatagtggtcatatttggaagctgagaagtcgattttctcaaggagatttctgttgtggttgttgtaatggggcttacttgggaagagacatctgttaatctagaacacatgagattagttttgtagtttgttcttgcgttgaaatccatctggcactttgattcatttctatttactgaggacctgctacatgctaggcactgagataggatggggaacaagacagacacaatctctgccatcatggaggccagaagggaaaagacaaataatgggcaattgctatattttaataaatgcctgggtaggagacatgtagcttggtttgggaacacgtgtcagggacatctgacccaaacctgacagatgggaaaggcttcccagcagaacggagttccggtttgaggactgaggatgcgtgagcgttttagccagattcgagttggggcggggtggtcggggaggttgcaggaagagggaaagcactgtgaaggcccggaggcaagaatgtggtctgggttgcctcagttcttctttatcagatagcgtgcatgacttccttgttggagacacctagaaaaagcagatcaatggggaaagctattgaatatgctcagaaaacacttctctttctcatatctacctaacagaaaaagcttgagtctccacccccatctaccaatcccttcctggaagatgagccaacaccagagatggaggaactggcaacggagaaaggagatttagatcaagtaagtctggtttgcgtcaccacgggtaacctacccaatgtgcgtttctgaaaatcggtctgcttgctccagatacgatcctttggctcttggccacgttcagagatgacagctgttgtggtctttacagaaggcctttatctgaaagtgcatgtagaaaactccatgaaagggcagacttccctgcccacatctctgctcctgaagagccccgcctccaggacacacacaagcttcattagccactgtggtggggccaggagagttctgctctgcctcattcagcatctcctgagcttgtcagctgagtttttggtttgactgtcatctggtacagtgatgatgagagaggctgaacaatccccgggaagccagcagcaccctcggctaggagaggcctccatgcagtgtaagctgatcactttaggtctggaagccattggggaggcctggaaatgtcaaggtggccagtggcatatttgaagagttacttttcagagcacactaacactttaatttcctttggatttttctgtccaagtctaaatttcctctcccttcatcctacagaatggtgtttttggttaactgccatgttatgacaagggaggttagagcaataaatcagaacgtttcccttctagattagtgatccctgtttttaattgtctacacttggctgctggaggattattttacggtattgttttgctccagacaccaccaaaagggaggctggctgggaggaccagctctgagaaacctgtaaccatgtactttgcagctagccctgcattcattctttcccagcaccacaagggcaggagccaagagagcagagcttccaggagcagttctgaaatgatgcaatcaaatgtgtctggtcccttgattaaatgattgtaatagaatggatactcacacttttatagtcctttgcacttttaaattcttttacatgctttatgttatcgtcacaattcctgcctcttgctttataggtgatgaaactgcagctcagagaggttaagtggttggcccagggttgcacagcttggaagtggaggagcttaaactggaagccaggtctcaatgtcagaaactagaattcctttcccagtgctattttgttgatggactcatgtctcattgaagagtagaggacatagaactgaatctcaggaatagaagtaaatgaacaaaactgatgggacatcttgaggaggctccatcccggagatgtatttataggattagatgcagttgatttaaagccgtcatagtattgactggcatggaagaaaacaaacagtttcttgtaactaattaaatgcagttctcaattgcattttgggagcagggactagggtggaaagaaggctctgggtgtagagcccatgcttctggcatgtcctccacccacacagggccacctctgccctgtgagcatgctttgcgcaggagagccatttgcagagccctgatgtctcacgaatgctagtagctgccatggtcatgtccgaaattgtgcagttaaacactcagatgcttgcagtgttgccaggaaaagttattcttttcgctagtcatctctggatgttattaaattggattaagataggccccattacctacaaaatcagttttgccaggtaaaatgtaattttcctttttcttggaactttttcctcctatgaaagcttgaagttactgttgtaaggaccaagacctgctcattctaagaacacagaacactgacatctgaccagtacatggggtaaagcagagtcaggtgctgggaaaatgctggactcttgtcggccattaaccgactgaccatgtgaccttcagtaggttattctctctttagacttccctagcttgtctttagtgagagctaatggttttcaaactgtattccttggtgccccatcagatgtcactgtggaagttaggaggaggccagagacctagatccctgcgatcagagcagttttatcgcaagtcattttgtttttgtttttttttttaatttatttattttttattgataattcttgggtgtttctcacagagggggatttggcagggtcataggacaatagtggagggaaggtcagcagataaacaagtgaacaaaggtctctggttttcctaggcagaggaccctgaggccttccgcagtgtttgtgtccctgggtacttgagattagggagtggtgatgactcttaacgagcatgctgccttcaagcatctgtttaacaaagcacatcttgcaccgcccttaatccatttaaccctgagtggacacagcacatgtttcagagagcacagggttgggggtaaggtcacagatcaacaggatcccaaggcagaagaagttttcttagtacagaacaaaatgaaaagtctcccatgtctacttctctctacacagacacggcaaccatccgatttctcaatcttttccccacctttccccactttctattccacaaagccgccattgtcatcatggcccgttctcaatgagctgttgggtacacctcccagacagggtggtggccgggcagaggggctcctcacttcccagtaggggcggccgggcagaggcgcccctcacctcccgggcggggcggctggccgggcggggggctgacccccccacctccctcccggacggggcggctggcctggcagaggggctcctcacttcccagtaggggtggctgggcagaggcgcccctcacctcccggatggggcggctggccgggttgggggctgacccccccccccacctccctcccggacggggcggctggcctggcagaggggctcctcacttcccagtaggggcggctgggcagaggcgcccctcacctcccggacggggcggctggccgggcatggggctgacccccccacctccctcccggacggggtggctgccgggcggagacgctcctcacttcccagacggggtggctgccgggcagagaggctcctcacttctcagacggggcggctgccgggcggaggggctcctcacttctcagacggggcggttgccgggcagagggtctcctcacttctcagacggggcggccgggcagaaatgctcctcacctcccagaccgggtcgcggccgggcagaggtgctcctcacatcccagacggggcggcagggcagaggcgctccccacatctcagacaatgggcagccgggcagagacgctcctcacttcctagatgtgatggcggccgggaagaggtgctcctcacttcctaggtgggatggcggccgggcggagacgctcctcactttccagactgggcagccaggcagaggggctcctcacatcccagatgatgggcggccaggcagagacgcttctcacttcccagacggggtggtggccgggcagaggctgcaatctcggcactttgggaggccaaggcaggcggctgggaggtggaggttgtagcgagctgagatcacgcccctgcactccagcctgggcaccattgagcactgagtgaacgagactccgtctgcaatcccggcacctcgggaggccgaggctggcggatcacttgcggttaggggctggagaccggcctggccaacccagcgaaaccccgtctccaccaaaaccagtcaggtgtggcggcgcgagcctgcaatcgcaggcactcggcaggctgagtcaggagaatcaggcagggaggttgcagtgagccgagatggcagcagtacagtccagcttcggctcagcatgagagggagaccgtggaaagagagggagagggagaccgtggggagagggagagggagagggagagctgcaagtcattttgtattgtgggctttcagatgaaatttttttttgaaccagaggttttatgtaatttaaaaaaaaaatggccgggaatggtggctcatgcctgtaatcccagcactttgggaggctgaggcaggccgatcacctgaggtcaggagttcaaaaccagcctgaccaacatggtgaaactatgttgaaaccatactaaacaacatggtgaaaccatactaaaaatacaaaattagccgggcgtggtggtgcatgcctgtaatcccagctactcaggaggctgaggcaggagaatcgtgtgaacttgggaggcggaggttacagtgagccgagatcacgccattgcactatagcctgggtgacagagtgagactccatctcaaaagaaacaactaaaccccctaatctagctgatccacccaccatttcatgggctattactgattagtaataacacttacatgccagtgactaatgcctccacccacgccatcccttacctcctgctgcgtcaccagccctggccttgctggtggctgattaggtgggcgccccaggatctccctcttcccagagtggggtgcacaacaaaagcagacctcttggggtgggggagggaccccaccaggtgttagtggtgaaatcagccagaggtggttggagggaaggtctctgccggctctgtgggtgacctaacccatttcatggctgcagtcagtagccatgtggccctcaaggtaagggtcacaccctgctcactactgcagtttacgcctcgctgctgagaagagagagggaacctgaaagaaggtatttcgtttacaagagggcctgagcaatcagttgccaagatattcccaatgataaaaactgacatctgaaaggagcctgagggacactgaaagcataacagaaaggagcagaaataaggaatgtcccttctggtgatccgagcggttcgatttaatctgtttacattgggtagtaatgaaaggaagtgggaccagctgcagacctcctcactgtgacaacagtaaccttttattattccaccaaactccaggaggaaatagcttaaacatcttcagcttttggacagaattcacacactcagaacccggcccaaacattactgctaaatgacttagtgtagtgtttaagctgagaatcaaccctttgggcagttgcttggtgcaaagggaaatgccagttagccaaaattccagcacctactatctaaactgagcacgttcataacgtagccataggcaggaggcagccctgcaggaaaaaagtaagaaaaaaggaaacttcaggcagtctctcccattattcctctcttgcttcagctcactagaagtgctgcaagaggacccgggtgctgtggtggcagggtcaagggtccctcctcactgcagaagagtgctgttggtggggagggcagggcagggcagcgtcatctgcagatagaggtggaaccctggcactgcctggtcatgcagctttctgagtgtcctgtggggcctcatcaagggcaggacctgtgggacgtcatcaagggcagggcctgtggcagactgaacaagatgagttcgttggaattatgtagccattttctttactcacttggaatctgtattttatacctaagagatgagctcttcacacttactccaacatagtttctttcaaatcatatatcacttttgtgcatacataaaaaggaaactataggcaaaataaataaagatatttctaaaacttcttcacatgcaggtccacatcttctgaaccactttttaaaaaactttatattttgaaataattatgggctcataaattataaacctagtacagcgaggtacagtgtactgatctcccagcgtcctccaggggacagctaacatagtagagtccatcatcaaaccaggaaattgatccagaccccttcccatctcccagcttcctccagggggacactagagtgcatcatcaaacgaggaaattgatccagaccccttcccatctcccagcttcctccagggggacactagagtgcatcatcaaacgaggaaattgatccagaccccttcccatctcccagcttcctccagggggacactagagtgcatcatcaaatcaggaaattgatccagaccccttcccatctcccagcttcctccagggggacactagagtgcatcatcaaaccaggaaattgatccagaccccttcccatctcccagcttcctccagggggggcactagagtgcatcatcaaaccaggaaattgatccagaccccttcccatctcccagcttcctccaggggggacactagagtgcatcatcaaaccaggaaattgatccagaccccttcccatctcccagcttcctccgggggggcactagagtgcatcatcaaatcaggaaattgatccagaccccttcccatctcccagcttcctcgagggcagggcactagagtgcatcatcaaaccaggaaattgatccagaccccttcccatctcccagcttcctccaggggggacactagagtgcatcatcaaaccaggaaattgatccagaccccttcccatctcccagcttcctccagggggacactagagtgcatcatcaaatcaggaaattgatccagaccccttcccatctcccagcttcctccagggcagggcactagagtgcatcatcaaacgaggaaattgatccagaccccttcccatctcccagcttcctccagggggacactagagtgcatcatcaaacgaggaaattggtccagaccccttcccatctcccagcttcctccagggggacactagagtgcatcatcaaacgaggaaattgatccagaccccttcccatctcccagcttcctccagggggacactagagtgcatcatcaaaccaggaaattgatccagaccccttcccatctcccagcttcctccagggtggggcactagagtgcatcatcaaaccaggaaattgatccagaccccttcccatctcccagcttcctccagggggacactagagtgcatcatcaaatcaggaaattgatccagaccccttcccatctcccagcttcctcgagggcagggcactagagtgcatcatcaaaccaggaaattgatccagaccccttcccatctcccagcttcctccaggggggacactagagtgcatcatcaaaccaggaaattgatccagaccccttcccatctcccagcttcctccagggggacactagagtgcatcatcaaatcaggaaattgatccagaccccttcccatctcccagcttcctccagggcggggcactagagtgcatcatcaaacgaggaaattgatccagaccccttcccatctcccagcttcctccaggggggacactagagtgcatcattaaaccaggaaattgatccagaccccttcccatctcccagcttcctccagggggggcactagagtgcatcatcaaaccaggaaattgatccacacccctatttcgctgaggcaggagtgcctttgcctcccacacagtgttgccctccagcccatgcggtgttgacaatgtgccattctttatttatttatttattattatactttaagttttagggtacatgtgcacaatgtgcaggttagttacatatgtatacatgtgccatgctggtgcgctgcacccacaaactcgtcagctagcattagggcattaggtatatctcccagtgctatccctcccccctcctcccaccccacaacagtccccagagtgtgatgttccccttcctgtgtccttgtgttctcattgttcaattcccacctgtgagtgagaatatgcggtgtttggttttttgttcttgcgatagtttactgagaatgatgatttccaatttcatccatgtccctacaaaggacgcgaactcatcattttttatggctgtgtagtattccatggtgtatatgtgccacattttcttaatccagtctatcattgttggacatttgggttggttccaagtctttgctatcgtgaataatgctgcaataaacatacgtgtgcatgtgtctttatagcagcatgatttatagtcctttgggtatatacccagtaatgggattgctgggtcaaatggtatttctagttctagatccctgaggaatcgccacactgacttccacaatggttgaactagtttacagtcccaccaacagtgtaaaagtgttcctgtttctccacatcctctccagcaccggttgtttcctgactttttaatgatcgccattctaactggtgtgaaatggtatctcatcgtggttttgatttgcatttctctgatggccagtgatggtgagcattttttcatgtgttttttggctgcataaatgtcttcttttgagaagtgtctgttcatgtcctttgcccactttttgatggggctgtttgtttttttcttgtaaatttgtttgagttcattgtagattctggatattagccctttgtcagatgagtaggttgcgaaaattttctcccattttgtagttgcctgttcactctgatggtagtttcttttgctgtgcagaagctctttagtttaattagatcccattggtcaattttgtcttttgttgccattgcttttggtgttttagacatgaagtccttgcccatgcctatgtcctgaatggtaatgcctaggttttcttctagggtttttatggttttaggtctaacgtttaagtctttaatccatcttgaattgatttttgtataaagtgtaaggaagggatccagtttcagctttctacatatggctagccagttttcccagcaccatttattaaatagggaatcctttccccatttcttgtttttctcaggtttgtcaaagatcagatagttgtagatatgcggcattatttctgagggctctgttctgttccattgatctatccaggagaacttccccaatctagcaaggcaggccaacattcagattcaggaaatacagagaacgccacaaagatactcctcgagaagagcaacaccaagacacataattgtcagattcaccaaggttgaaatgaaggaaaaaatgtcaggggcagccagagagaaaggtcgggttatcctcaaagggaagcccatcagactaacagcagatctctcggcagaaactctacaagccagaagagagtggtggccaatattcaacattcttaaaagaattttcaacccagaatttgatatccagccaaactaagcttcataagtgaaggagaaataaaatacttcacagacaggcaactgctgagagattttgtcaccaccagacctgccctaaaagagctcctgaaggaagcgctaaacatggaaaggaacaaccggtaccagccactgcaaaatcatgccaaaatgtaaagaccatcaagactacgaagaaactgcatcaactaacgagcaaaatcaccagctaacatcataatgacaggatcaaattcacacataacaatattaactttaaatgtaaatggactaaatgctccaattaaaagacacagactggcaaattggataaagagtcaagacccatcagtgtgctgtattcaggaaacccatctcacgggcagagacaccacataggctcaaaatgaaaggatggaggaagatctaccaagcaaatggaaaacaaaaaaaggcaggggttgcaatcctagtctctcataaaacagactttaaaccaacaaagatcaaaagagacaaagaaggccattacttaatggtaaagggatcaattcaacaagagctaactatcctaaatatatatgcacccaatacaggagcacccagattcataaagcaagtcctgagtgacctacaaagagacttagactcccacacattaataatgggagactttaacaccccactgtcaacattagacagatcaatgagacagaaagtcaacaaggatactcaggaatggaactcagctctgcaccaagcggacctaatagacatctacagaactctccaccccaaatcaactctccaccccaaatcaacagaatatacatttttttcagcaccacaccacatctattccaaaattgaccacatagttggaagtaaagctctcctcagcaaatgtaaaagaaattataacaaactatctctcagaccacagtgcaatcaaactagaactctggattaagaatctcactcaaaaccgctcaactacatggaaactgaacaacctgctcctgaatgactactgggtacataacgaaatgaaggcagaaataaagatgttctttgaaaccaacgagaacaaagacgcaacataccagaatctctgggacacattcaaagcagtgtgtagagggaaatttgtagcactaaatgcccacaagagaaagcaggaaagatccaaaattgacaccctaacatcacaattaaaagaactagaaaagcaagagcaaacacattcaaaagctagcagaaggcaagaaataacgaaaatcagagcagaactgaaggaaatagagacacaaaaaacccttcaaaaaattaacaaatccaggagctggttttttgaaaggatcaacaaaattgatagactgctagcaagactaataaagaaaaaaagagagaagaatcaaatagatgcaataaaaaatgacaaaggggatatcaccaccgatcccacagaaatacaaactaccatcagagaatactacaaacacctctatgcaaataaaccagaaaatctagaagaaatggataaattcctcgacacatacactctcccaaaactaaaccaggaagaagttgaatctctgaatagaccaataacaggagctgaaattgtggcaataatcaatagcttaccaacgaaaaagagtccaggaccagatggattcacagccaaattctaccagaggtacaaggaggaactggtaccattccttctgaaactattccaatcaatagaaaaagagggaatcctctctaactcattttatgaggccagcatcatcctgataccaaagccgggcagagacacaaccaaaaaagagaattttagaccaatatccttgatgaacattgatgcaaaaatcctcaataaaatactggcaaaccaaatccagcagcacatcaaaaagcttatccaccatgatcaagtgggcttcatccctgggatgcaaggctggttcaatatacgcaaatcaataaatgtaatccagcacataaacagaaccaaagacaaaaaccacatgattatctcaatagatgcagaaaaggcctttgacaaaattcaacaactcttcatgctaaaaactctcaataaattaggtattgatgggacgtatctcaaaatcataagcgctatctatgacaaacccacagccaatatcatactgaatgggcaaaaactggaagcattccctttgaaaactggcacaagacagggatgccctctctcaccactcctattcaacatagtgttggaagttctggccagggcaattaggcaggagaaggaaataaagggtattcagttaggagaagaggaagtcaaattgtccctgtttgcagacgacatgattgtatatctagaaaaccccattatctcagcccaaaatctccttaagctgataagcaacttcagcaaagtctcaggatacaaaatcaatgtacaaaaatcacgagcattcttatacaccaacaacagacaaacagagagccaaatcatgagtgaactcccattcacaattgcttcaaagagaataaaatacctaggaatccaacttacaagggatgtgaaggtcctcttcaaggagaactacgaaccactgctcagtgaaataaaagaggatacaaacaaatgggagaacattccattctcatgagtaggaagaatcaatatcgtgaaaatggccatactgcccaaggtaatttacagattcaatgccatccccatcaagctaccaatgactttcttcacagaattggaaaaaactactttaaagttcatatggaaccaaaaaagagcccacatcgccaagtcaatcctgagccaaaagaacaaagctggaggcatcacactacctgacttcaaactatactacaaggctacagtaaccaaaacagcatggtactggtaccaaaacaagagatatagatcaatgggacaatatgccattcttaagatggctccattgaggtctctggaattttccaccaggccactgtacccattttccaagttttctgacgttatcctttactttttttctttttaaaataatgtcaaactaagagaaaagttacaaggagctcctaaatatctttcttctggattcagcaattgttaacattttgctatataactttattatttcctccccactcccccccgacctttagaacaatttgtaagttgtagacataatgtcctttacccctaaatattttagtatatatttcttaagaaaaagggcattcaattctattaccatagatcaaaatcagaaaatttaacatccatacagtaatctataatatataggcttttaaagattttcataatgtagccattttaaagtgataaaatattgtcagtagttgggaaagtacacataaattagtaagtcagtaaagctgaatacaaaatatacatgttcaaaatttaaaaaaaaagcaaaatatacacgttgatttttttaaatgttaacattctgtattatgtaaattcacatgtataattaccagaagttatcctgcagagtgtgaatattttcttcaaaagaagaaaaaaattaaataaaaagaatagctataatacttatcattattatttaattaataaaaagatatctgtttgtagtagccatgttttccaaatctgaatccatgatatctagtcctatagagttagacaaattaaatcacatttttctattcacttaagtcatcttattgaatcaataataaaagatactgacttggaataaacaggacaagtgggtgaggacacccctcacaatcctcatcctccatcatagatccttcatcttaaactaatggaaatgcagaaaaactcccaggacatctgtgcactcaagtggaattctagatccggcagattcaagctcaatcagccaggcttgtgtggttgtgggctcagtccaaggcctggctttggcagtgacttccagatgataagagtaaaaacagtgcagattgtatttattcttaggaaggaccaaagtttctagaaaccttgccaaaaaatgaaagacatggaactcctgaaaggtaaaaagggaagagggttaagtacaagattgagtagatgtgtctaaagttgacatttaatttttagtgatcattttttacaaatcagtttttacagatgtttttaaccattgcaacgtgttatttaaaaaaaaatttttttaaaggccagaaataggtagttatcatttctgtcattagggcttatctcttccagtatttattaaaatatataagcagttcaagagggtagatcttatgttaagtattcttttttgtttgtttgtttgtttgtttttgaaatggagtctcactctgtcgccaggctggagtacagtggtgcaatctcggctcactgccatctccacctcctgggttcaagcaatttttctacctcagcctctcaagtagctgggactacaggcgcacaccaccacaacctgctaatttttgtatttttttagtagagacagggtttcaccatattggccatgctggtcttgaactcctgaccttgtgatccgcccaccttggcctcccaaagtgctgggattacaggcgtgagccaccgtgcccagcaagcattcttaccacaagtaataataatcgtaacaacaggggtgggaggaggcttggggaggtggtggatacacttactgccttgatggtggtgagggctttgtgggtgtgtacttatcctcaaacgcatcaagatgtatacattaattatgtagggcttttaaaatgtcaatcatacctcaataaagtgggtttttaaaaaataagatatgagtagttcaatttaacaagtatgttgtgggtgccaatttacatgcaaattatgatttagtatcaaccccagcatggtgtgtttggctcagggtcattttgtagacatttggcaatagacagaattcacatttgttaggaatagaagtaatacataggaaaatctttgcttattttttagatgtttggaaaggaattaagtggcaaatattgttttaaaatacttgcctgtcatatgacttctttatcagtggcttccaagtaacagcctgggaaccagcgctcatctagtgttgcagtggcctaaagcaaaaaataaagacaatatagtctgcctgcctgcctgcctgtctctctctctatctatctgatgtaaggttaccaactgtcctttcttagaaagtactgcctatatgctgctattttattcttataaaatttgggggtataaaatacaattttctggctgggcgccatgcctcatgcctataagcccagcactttgggaggtagaggtgggtggatcacttgaggccaagagttcgagactagcctggccaacatggcaaaaccccacctctacttaaaatacaaaaattagctcggtgtggtggcgtgtgcctatagtcccagctacttaggaggctgagacacaagaatcacttgagtccagaaggtgcaggttgcagtgagctgagatggcgccactgcactttagcctgggtgacagagggagactctgtctcaaaaagcaaacaaaaaaaccctttatttgttttttttttaggaactcgtggtaagaatagaaagtagcaaaataaagttaacaatcctctattggttgtccattcttctttttcttacattttcttactgatggaattcaaaaaattctgggaaccattgcaggaaaataatggtataacagaaagagttctagtttaagaaaagcagacgtctacatatgtgttggggcaggttagagaacctctgagtcctcatttcttgaggtgtaaaatagtagtagtcatacctacatgaaggattattgtgaggagcaggtgacatattagttggtatcaaagtgctatcaaaaattggattgtgtgaaagcactttttaaattctaaagcactgtgtaaatacaaggtgctattattagctgggatttaaattctggaaaacaccagtcagatagatgatgacttgcttccagattcaaaacacatatgttatccaggtagcagtatgtctttcatcgtccagagcaagtgagttatgctaacaaagctggtttttcttcacctgccagggtgaatggtgaaaccatcgtattgggttacattgagtactctcttatctgtgacttaggaatgaactttgaaatgatgtttttaaaaaaattcttgaacatttgcaaagatcactcaagtatggggtttatttttctttgtttttacagccaaagaagcctaaagccccagacaatccatttcatggcattgtttccaagtgttttgagcctcatctctacgtgtatatcgaatcccaagacaagtgagtgaggaacattcgctgttttctgcctgcatttctcgccgctctggtcatgactgggtcttaggagcgcacagctccttccggggctgaaagatggttgtggcatgcctgtgaccctccctagaaacccattaggggtatttttacatcttttgaatgttatcattaattgtgtctataaatctcagagcctgagtttgcccctaataaggtccccagtggatccctacattgggatcccttcctatgtgggtgttgagccctgacatatatcagcccacaaagctttacagtgtcaggcactgggtattggaagaaagcctagtctctaatatatatgttttcaagtataatttatccttttattttgaaataatttagacttataaaaaagttacaaaaataggacaaaaaattttcacatgccctcctcagagaatgttaacatcttacataacaaccagagttaccaaaatcgagaaggtaatactgtcccattaatgcccctttttctggtccaggacccaataatcatgcatttcgttgtcagatctctttgatcttggtctcctttaatcttgagtagttcctcatctttttattccctcccctcccctccttttttgagacagagtctcacgctgtcccccaggctggggtgcagtggtgagattatgacttactgcatcctccatctcctgggctcaagcaatcctcccactgcagtctcccaagtagctgggaccacaggcacatgccaccctctatttttagtagagattctgtctccctgtgttgcccaggctggtctggaactcctgggctcaaatgatccacccacttgagcctcccaaagtgctggaattacaggcatgagccaccttgcccagccattcctcaagttttctttgtctttcacgacctcagtgtgtactggccaggtattttgtacaatgtcctcagtttttgtttgttttttcttgatgaaatcaattttgggcaagaacaccataaaagtggcattgtatccccagtgcattgtgtcaagaggcacatcacattgatttgtcccattattggggacttcgattacttgctttaggtggtacctgccaactgtcttcaatgtgaagttactatttttctcctggtaattaataagtatcttatgggatgatactttgtaaatatcctgctctcatcaaacttttgcccactcatttcgcatcccttgattgattcctgacggaagcgttgtttctgtggcatttgccaaatgtcgattgtctattttcatcatttcttctacatttactaattggagttctactatatggaagaattttccctctcccctatttgtttatatatcagtatgaactcatggattctgattttattttatggatcatctatataatacagtatatgcttttcacgtggccaggtacagtgggtcacacctgtaatcccagcactttgggaggccaaggtaggaggagctcttgagcccaggattcaagaccagcctgggcaacatgctgaaacctcatctttataaataatttttttaaaaaaactagtcaggtgtggtgatgcacacctgtagtcccagctactcgagaggctgaggtgggaaaatcactggagcccaggaggcagaggctgcaattagccgtcactatgccacccagcttggtgacagagacttcgtctcaaaagaaaaaaagaaaagaaaagcaaacaaaatatactatatgcttttcacaaacttgtagcctccaaatatttttataaagcatctcactgcggccaggtttcttccctcccaccctgtttttaaaaaaatcccaaagacttccaaactaacagccgaagactgtgttcgtgctccagtgtccgttgtgtgcgtgagggggcattagaaaaggaggaagactcctcctcatccctgcgtccttgtccgcagccaagcccttccacgttggaaggcaggttttggaaaggtcaagatgattgtaacgagatgactggagacagactggcctgggctcccagaggaagcctcacagtctaaagaacgcactcggaagggaccagaaggtggctcccatggggagagcaacagcggctgcaggaaagtcctgagggaagttcttcaggaacacactgaggttctgagggaagatctctggaaacacattgggttctgagggagcttcttggggaatgcattaggtactgagggaagttatctgggaacatattaggtcctgagggaggttccctgggaacgcattaggtactgagggaagttctctgggaatgcattgaggttctgagggaggttccctgggaacgcatgaggtcctgatggaggttctctgggaacgcattgaggttctgagggaagttctctgggaacgcattgaggttctgaaggaggttctctgggaatgcattgaggtcctgagggaagttctctgggaacacattagattctgagggaggttctatgggaacccattaggttctgagggagattctctgggaacgcatttggttcagaagggagttctctgggaacgcattgaggtcctgagtgaggttctccgggaacacattaggttctgagggaggttctttgggaacgcattcaggttctgagggaggttatctgggaatgcattaggttctgatggaagttccctgggaacgcattaggttctgaggaaagttctctgggaatgtattgaagttctgagggaggttctctgggaacgcattaggtcctgaggaaggttctctgggaacgcattgaggttctgagagaggtctctgggaatgcattaggtcctgggggaagttctctgggaacgcattaggtcgtgagggaaggtctctgggaacgcattgaggttctgagggaggttctgtgggaatgcattatgtcctcagggaggttctctgggaacacactgaggttctgagggaggttctctgggaatgcactgaggttccgaaggaggttctctgggaactcactgaggttctgagggaggttctctgggaacatattaggttctgagggaagttctttgggaacgcattaggttctgagggagattctctgggaacgcattgaggtcctgagggaagttctttgggaacgcattaggttgtgagggaagttctgtgggaacgcattaggttctgagggaggttctctgctaatgcactgaggttctgagggaggttctctgggaacactttagattctgagggaagttctctaggaacgcattaggttctaagggaggttctctggaaacacattaggtcctgagggaggttctctgggaacgcattaggtcctgagggaagttctctgggaacgcattaggtcctgagggaagttctctgggaacacattaggttctgagggaagtcctctgagaatgcatggagattctgagggaggttctctggaaacgcattaggttctaagagaagttctctgggaacgcattgagattctgagggaggttatctcggaacgcattaggttctgagggaggttctctgggaacgcattgggttctaagggaggttctctgggaacacgttagggtctgagggagtttctctgggactgcgttgaggttctgagggaagttccctgggaacacattagcgtctgaaggaggttctctgggaacgcattgagcttctgtggaggttctctgggaacacattgggtcctgagtgatgttctctgggaatgcactaggttctgagggaggttctttgggaatgcattagatgatgagggaagttctgtgggaacgcattgaggtcctgagggaggttctctgggaacgcactgggttgtgagggaggttctctggggacacattgggttctgagggaggttctctgggaatgcattaggtcctcagggaggttctctgggaacacactgaggttttgagggaggttctcagaatgcactgaggttctgagggaggttctctgggaacacattaggttctgagtgatgttctctgggatgcattaggttctgagggaggttctctgggaacacattaggttctgagggaagttctcctggaactcattagttcctgagggatgttttctgggaacgcattaggtttgaaggcaggttctctgggattgcactgaggttctgagggaggttctctgggaatgcattagattctgagggaggttctctgggaacgcattaggttctgaaggaggttctctgggaacacattaggttctgagggagggtctctgggaacacattgaggtcctcagggaggttatctgggaatgcactgaggttccaagggaggttgtctgcgaatgtactgaggttctgagggaggttctctgggaacgcattgaggtcctaagggaagttctctgggaacgcagtaggttctgagggaatttctgtgggaacgcattagattctgagggaggatctctgggaacgcatttaagttctgaggaaagttctctaggaacgcattaggttctgaggaaggttttccggggatgcattaggttctgagggaagtcctctgtgaatgcattacgtccttagggaggttctctgggaacgcattaggttctgagggaagttctctgggaatgccttaggttctgagggaagttctctgggaatgcattcaggttctgagggaggttctctgggaacgcagtaggttgtgtgggagcttctttgggaacgcattatgttctgagggagattctcagggaatgcattaggttttgagggaagttctctgggaatgcattaggttctgaggaaggtcctctgtgacctcagggttctcagggaggttctctgggaacgaattaggttcttagggaagttctctgggaacccattaggttctgagaggggttctctgggaacgcattgaggtcctgagggaggttctctggaaacgaattgagatcctgagggaagttctctgggaacgcatcaggtcctgagtgaagatctgtgggaatgcattaggttctgagggaggttctctgcgaacgcactagcttttaagggaggttctctggaaacgcattaggtcctgagggaggttctctgggaatgcattaggtcctgagggaagttctctgggaacacattaggtcttgagtgaagtcctgtgggaacgcattaggttgtgagggaaggtctctgggaatgcattaagttctgagggaggttatctgggaacgcattaggttctgtgggaggttctctgggtacccattaggtcttgagggagggtctctgggaacgcgtagaggtcttgatctctgcgaatgcgttgaggttctgagggaggttctcttggaatgcattaggttctgagggaggttctcttggaatgcattaggttctgagggaggttctctgggaacgcattgaggtcctaagggaagttctctggtaatgcatcaggttctgagggaatttctctgcgaacgcattagattctgagggaggatctctgggaacgcattaggttctgagggaagttctctaggaacgcattctgtcctgagggaggttctctgggaacacattaggttctgagggaggttccctgggaacacattaggtcctgagggaggttctctggcaatgcactgaggttctgagggaggttctctgggaaggaattaggttctgagggaagttctctgggaatgcattaggttctgagggaggttctctgggaacgcattaggttctgagggaggatctctgggaacaccttaggtcctgagggaggatctctgggaacagattgaggtcctgagggaagttctctgggaattcactgagattgtgagggaggttctctggaaacgcactgaggttctgagggaggttctctgggaacgcattaggttctgagggaatttctctgggaacgcattaaattctgagggaggatctctgggaacgcattagtttctgagggaagttgtctgggaatgcattaggttttgagggagcttctctgggaaggaattaggttctgagggaggttctctgggaacacattaggttctgagggaggttctctgggaacgcattaggttctgagggatgttctctgggaccgcattaggtcctgagggaggttttctggtaatgcactgaggttctgagggaggttctctgggaccgcattaggtcctgagggaggttttctggtaacccactgagattctgttgggggttctctgggaatgcattagattctgagggatgttctctgggaccacattaggtcctgacggtggttctctggtaatgcactgaggttctgagggaggttctctggcaaggaattaggttatgagggaggttccctgggaacgcattaggtcctgagggtggttctctgttaatgcactcaggttctgacggaggttctctgggaaggaattaggttctgagggaggttctctgagaacgcattaggtcctgagggtggttctctggtaatgcactgaggttctgagggaggttctctgggaaggaattaggttctgagggaagttctctcggaatgcattaggttctgagggaggttctctgggaacacattaggtcatgagggaggatctctgagaacacattgaggtcctgagggaagttctctgggaatgcactgagattgtgagggaggttctctggaaacgcactgaggttctgagggaagttctgtgggaacgcattaggttctgagggatgttctctgggaccacattaggtcctgagggtggttctccggtaatgcactgagattctgagggaggttctctgggaaggcattaggttctgagggaatttctctgggaacgcattaaattctgagggaggatctctgggaacgcattaggttctgagggaagttctctaggaatacattaggttctgagggaggttctctgggaacgcattaggttctgagggaggttctctgggaacgcattaggttctgagggagattctctgggaacgcattaggttctgagggaggttctctgggaacgcattaggttctgagggatgttctctgggaccgcattaggtcctgaggaaggttctctggtaatgcactgaggttctgagggaggttctctgggaccgcattaggtcctgagggaggttttctggtaacccactgagattctgttgggggttctctgggaacgcattaggttctgagggaggatctttgggaacgccttaggttctgaaggaagttctctacaaacgcattccattctgagggaggttctctgggaacgcattaggttctgagggatgttctctgggaccgcattaggtcctgcgggaggttttctggtaatgcactgagattctgttgggggttctctaggaacgcattaggttctgagggatgttctctgggatcgcattaggttctgagggaggttctctggtaattgactgaggttctgagggaggttctctgggaaggaattaggttctcagggaagttgtctgggaatgcattggcttctgagggagcttctctggaaacgcactgaggttctgagggaggttctctgggaacgcactgaggttctgagggaatttctctgggaacgcattaaattctgagggaggatctctgggaacgcattaggttctgagggaagttctctaggaatgcattaggttctgagagaggttctctgggaaggaattaggttctgagggaagttgtctgggaatgcattacgttctgagggagcttctctggaaacgcactgaggttctgagggaggttctctaggaacgcattaggttctgagagaatttctctgggaacgcattaaattctgagggagcatctctgggaacgcattaggttctgagagaatttctctgggaacgcattaaattctgagggaggatctctgggaacgcatcaggttctgagggatgttctctaggaatgcattagattctgagggagattctttgggaacgcattaggttctgagggaatttctctgggaaagaattacctgcttaggaaggttttctggtaatgcagtgaggttctgagggaggttgcctgggaacgcattaggttctgagggaggttctctgaaaacgcattgaggtcctaagggaagttctttgggaacgcattatgttctgagggaatttctctgtgagtgtgttagattctgaaggaggatctttgggaacgcattaggtcctgagggaggatctttgggaacgcattaggttctgagggatgttctctgggaccacattaggtcctgagggtggttctctggtaatgcactgagattctgagggaggttctctgggaatgcattaggttctgagggaatttctctgggaacgcattaaattctgagggaggatctctgggaacgcattaggttctgggggaagttctctgggaatgaattacgtgcttaggaaggttctctggtaatgcactgaggttctgagggaggttgcctcgaaatgcattactttgtgagggagattctctgggaacgcattgaggtcctaaaggaagttctttgggaatgcattaggttctgagggagtttctctgcgaacgtattagattctgagggaggatctctgggaacgcattaggttctgagggatgttctctgggaccgcattaggtcctgacggaggttttctggtaatgcactgagattctgttgggggttctctgggaacgcattaggttctgagggaggctctgtggtaacgcattaggtttggagggatgttctctgggaacgcattgaggtcctgagggaggttctgtggtaactcattgaggttctgtgggagattctctaggaatgcattgtggttctgagggaggttctctgggaactcactgagttctgacagaggttctctgggaaagattaggttctgagggaggttctctgggaacgcattgacgtcctgagggaagttctctggaaatgcattaggttctgaaggaggttttctgggaaagcattaggtctgagggaagttctttgggaacacattaggttctgagggaggttctctgggaatgctttaggttctctgagaggttctctgggaacgcactagatcctgagcgaggtttctgggaatgcattgaggtcctgagggaggttctctgctaagtcattgaggttctgagggaggttctctaggaaagcattgaggttctgagggaggttttctgggaacgcattaggttctgagggaggttctctgtgaacgctttaggttctgagggaggttctctgggaatgcactgaggttctgagggaggttctctgggcacatattgggttctgagggaggttctctggaaatgcactgaggttctgagggaggttctctgggcacgtattgggttctgagggaggttctgtgggaacgcatggaggtcctgagggaggttctctgggaatgcattaggttctgaagaaatttttctgggaacgcattagattctgagggaggatctttgggaccacattaggttctgtgggaagttctctgggaatgcattgaggtctgtgggaggttctctgggaacgcattaggtgctggaggaggttctgtgggaatgcattagctcctgagggaggttctctgggaacacattaggtgctgagggagattctctgggaatgcattaggttctgaggtatgttttctgggaatgcattgaggttctgagggaggttctctggcaatgcattaggttctgagggagattctctgggaatgcattaggtcctgagggaggttgtctgggaaagcgttaggttctgagggaagttctttgggaatgcattgaggttctcagggaagttatctgagaacgcattaggttatgaggcagattgtctgggaacacattaggttctgagagaggttctctgggaaccatttaggtttgagggaggttctctgtgaacacattaggttctgagggaggttctttggaaactcattaggttctgagggaggttctctgggaacacattgaggttctggggtggtttttcggaactcatttggtcctgagtgaagttctctgagaacgcgttaggttgtgagggaggttttctgggaacgcattaggttctgagggaggttctctgcgaatgcattaggttctgagtgaagttctctgggaacacatttaggtcctaagggaatttctctgggaacgcattagggtctcagggaggttcgctgcgaatgcattaggttctgagggaagttctctgggaacgcattaggttctgagagttttctaggaacgcattaggtcctgagggaagtcttctgggaccgcattaggttctgagggaaggtctctgggacgcactaggtcctgagggaggttctctgggaaagcattagattctgggggaggttctctgggaacgcattgaggttctgagggaggttccctggaacacattagatcctgagggaatttctctgggaatgcattaggttctgagggaagttctctgggaatgcattgaggttctgaggaaggttctctgggaacgcattaggttctgagggagattctctgggaacacattaggttctgagggacattctctgggaacgcattgaggttctgagggaagttctctgggaacgcgttaggttctgagggaagttctctgggaacgtattaggtttttagggaggctctctggggttgcatttacgcatttaggtctgattgcacttcacccctccccttgtttttaatgcttctatcatgggtgagcacattcttagtttcaaacatgtttcttaaaccgtaacagtaagacaatgtttcaattagaaacttcacatggaactgtattattcactcacgtgattttatggactgcttctatgcttttcatgcccgattacaaagtacttcatattaaaatctcagaaaatgaacttgcccagtagcttctccatcatcaaatggaagtctccccatcagcccaccaccaaaggcaagttgccttgccgtcatttgccttgcaaagacccagtagtgcccttgctcttgcccagtgggcacgtgcccagcaggcacaccgaggtacagtggggacttctgcctctttgtccttgagagcaccctgtcttctacattcacagtttgcctccaggaagttactaagacacccctgaggggcaggaaaaaggattggttatttgcctattagagtcacaggtctttgaggaacccccctggatgactcttttcagccaaagccccatcttctcttaacccaaatttttcgttttaaaaggcttaaaagttactgggtccagggtttatttttatttatttatttttgagacggggtctcagtgtcagctaagatggagtacagaggcgtgatcaggactcactgtagcctcaacctcctgggtttcagcagtctttcctactcagcctctcaagtagctgagactacaggcacacaccaccacacctggctaatttttgtattttttgtagagacgcagttttgccatgttgcccaggctggtctcgaactcctgggcttaagaggtcagcccacctccacctcccaaagtgctgggattacaggcatgagccaccgcgcccagccaaggcccagggtttaaagcacatgtctgaggtagccacatcctttcccaaaacctacctggtttaaagggtcatttttctgagttattgtaattctggcatccactcttttcacatggccttgatttatacaaagtatactcattgttcatgatactttgggcaaggagccaggcctcccttccttggggactctccattttcctgtgaaaaatgaagtgctggccacttaccctgctgtttggcctcactaggaagtttccgcagcactaaggaaggagcagatactgcgcaggctgtgctgctgttcctgcagaataaacactgtaactcaaagtagaaaatagagttcaaagaactccatttccttatctgtcaagagagatagtcagacaaaataatgcccaacgcactcgttattaaccattttaaagtcatagatcctttttaagaacccaatggaaagcatcgacgctcttgtcaaaaaaatccatatcatgcacacactattttgagtgtaatttcaaggagttctaggaactgcttcttcccttcaaagaatcctgaggctggagaaggaactcaggtggggactggttttgtgcacattactacttttgctgtagctctaactcagaaagcatgagaccattcataacttcccagatgacagagacgcaacacagtgtggtggaaagagcgtgggcctgatcccagacatacctagatgtgaggcttcgcgcttgctaggctgggaccttgagcatgctcctagctagcccctctacactgtgaggatcataaggccgacctcatggactttgtggcgaggaggagaagaggtggcattttcaccttcagcacacagtaaatggtgctcaggaacagtgcctgccctgccatccctctcatctttttcaggactcctatgtgggtgggtggccttgtcagtgtggccagatttctcttgagcctggcatggggtccaccttctcatctccccagcctcccacctgccaagggaaagttccggcagcatctgccccagccaaaagccaagtagcagtaggaggactgcagagccagtactcagggaggaggcaggaagtggggatggccactagcaggttgggctaagccgtccttacatcctttaaatggctttctcaatttttatttatgttcaaagaggaggttagtctgtcttctacccttggcatttagtgatttcctctggctgactcttgcaaaagaaatttctacataggcactttctttaccccattctatggcgttctccatcagggaagttactggtgactccatatctgcccattctcctgagttccctctaataacttttgttagactagaactcatgcttttctagagcctagcatctgtctgtaaactaattaccattgttgattattttattttatttttatttttatttttattgatcattcttgggtgtttctcacagagggggatttggcagggtcataggacaatagtggagggaaggtcagcagataaacaagtgaacaaaggtctctggttttcctaggcagaggaccctgaggccttccgcagtgtttgtgtccctgggtacttgagattagggagtggtgatgactcttaacgagcatgctgccttcaagcatctgtttaacaaagcacatcttgcactgcccttaatccatttaaccctgagtggtcacagcacatgcttcagagagcacagggttgggggtaaggtcacagatcaacaggatcccaaggcagaagaatttttcttggtacagaacaaaatgaaaagtttcccatgtctacttctttccacacagacacggcaaccatccgatttctcaatcttttccccacctttcccgcctttctattccacaaaaccgccattgtcatcatggcccgttctcaataagctcttgggcacacgtcccagacgcgctgggcagaggggctcctcacttcccagtaggggcggccgggcagaggcgcccctcacctcccggatggggcggctggccgggcggggggctgacccccccacctccctcccggacggggtggctgcccggcggagacgctcctcacttctcagacggggcggctgccgggcggaggggctcctcacttctcagacggggcggttgccgggcagagggtctcctcccttctcagatggggcggctgggcagagacgctcctcacctcccagacggggtcgcggccgggcagaggcgctcctcacatcccagacggggcggcggggcaaaggcgctccccacatctcagacgatgggcggccgggcagagacgctcctcacttcctagatgggatggcggccgggaagaggcgctcctcacttcctagatgggatgggggccgggcagagacgctcctcactttccggactgggcagccaggcagaggggctcctcacatcccagacgatgggcggccaggcagagacgctcctcacttcctagacggggtggcggccgggcagaggctgcactctgggcactttgggaggccaaggcaggcggctgggaggtggaggttgtagcgagccgagatcacgcccctgcactccagcctgggcaccattgagcactgagtgaaccagacaccgtctgcaatcccggcacctcgggaggccgaggctggcggatcactcgcggttaggagctggagaccagcccggccaacacagcgaaaccccgtctccaccaaaaaaatacgaaaaccagtcaggcatggcagcgcgcgcctgcaatcgcaggcactcggcaggctgaggcaggagaatcaggcagggaggttgcagtgagccaagatggcagcagcacagtccagcttcggctcggcatcagagggagaccgtggaaagagagggagagggagaccgtggggagagggagaccgtagggagagggagagggagactgtagggagagggagagggagaaggagagggagagggagagcccattgttgtttattttgaattaatttcaagcttacagaagaattataagaattatacaaagagcccttgtatagccttcatccagattcctcattaatagttatctcccccacacacgtaatgcacagacactgcatgcattttccttttcttttttctcttccttctttttctttttctctctttccctttctcttctccctcccctccccacccctcccctcccttcctctcccttcccctcctcctacttcagcctctagagtaactgagactacaggcacaggccatcacatcagtctaatttttgtttttttgtagagacagggtctcaccatgttgctcgggctggtctcaaactcctgggctcaagtgatctgctggcctcccaaagtgttgagattacagacgtgaaccactgtgcccaacctgtacttttttcctgaacctttgaattctcaagttgcagacaagattcgccactactccttaatacttcaatatatatttcttagaaacaaggtttctacataaccacagtacaactgtccacatcaggaaattaacgttgatacaacattactgcttaatcccagacccctcacataaccacagtacagctatcaacatcagggaattcacagtgatacagtattactgcttcatccatgctctcctcctcacatttcagcagttgtcccaatctgcttgtttgttggcctgtttgaatagccctaggatcacaggttgttagtttatttgtttgaatagctctcagatcgcaggttgtttgtttgtttaaatagctctaggatcacaggttgcatttagttgtcatgtctctttggtctccttcaacccagaagactaattgagtctttctttgtctttcatgaccttgacatttttgaagaggattggccaattactttctggaatttccctcagtttgggtttgtctgatgtttcctcattatttatgatttatgcagaagtggtcctgtgttcctaggaattcatatcaggaggcacagaatgccagtttatcccaaaacttgtgatgtgatgttctttttttttttttttttttttttgagacagagtcgtttcactctattccccaggctggagtgcagtggtgcgatctccactcactgcaacctccacctcctgggctcaagcaattctcctgcctcagcctcctgagtagctgggattacaggtacccgccactgcacccagctaatttttgtcttttttttagtagagacagggttttgccatgttggtcaggatggtcttgaactcctgacttcaggtgatccacccgccttggcctcccaaagtgctgagattacaggcgtgagctaccacggccagcctatgatgttcgtttttattacttggtgtagatgttgtctctactgggtatctctatttattaataagtgttgggagaaaccttgaaactttatcaatatccttttcctcatctttcacttatcatgtaatttattactaagatgattgacaatgatgatttttcttcttttttttttttttgaggcagagtcttgctctgtcgcccaggctggagtgcagtgacataatctcggctcctgggttcaagtgattctcctgcctcagcctcccaagtagctgggattatagatgctcgccaccatgcccagctaatttttttgtatttttagtagagacggggtttcaccatgttggccaggctggtttggaactcctgacctcaagtgatctgcccacctcggcctccctagatgttgagattacaggcatgagctgccgcgcccagtcaaatggtgatttttctagctacatcatttcttctgcgtttatcagttggcattctactttaagaaaagctgtcacttctcccccttatgtctatgtcagcatggactcatggatttttatattttattcagtaggttgtaggcatcactatctcttttatttttactgtattttggaataaatgtatacctataggaaaatttcacaaatagtacagatttcttatgttccccttcacccaacttcccctgatgttgacatcttatataaccacagcagagttgtcaaaactggcaagttaacattggtacattactatttaataacctgcacaccgtgtttgaacttcaccagtttttccattagtgtctgtttttccttccaggatttgtcgttgttattttagtactcaaattgtccctgacttggccagtgggagcctcttaaagctggctcttcatcctttttacatgccactatcattttttgagcacctccttcctctctggcacaataaaatatactaggcttatcctgtacttttgtatcccagccctggagtcgtccatttccccaggcatttcttgttcctttggtggaggatgacatttagaaaccaagtatgctcattgctgctcggtgtcattgcttccagattgccttggctgagagagctaagaaatgtatgtgtgtataaacatacgtgtatatgtctctatagctgtgtgtgcacctgcttctacatatatgcctctatagctgtgtgtgcacctgcttctatattagaacctgtgcatttgatgctgatgccttcaattctaatctcacaccacagggtttattttagcctctcccattcaacgttggcaactgccttctacaacagtgagaaatttgggtcctagcatgctcagtatatttacctatttgctcagtttgcctgtatgtaacccatctcccagctgtgctcaagccacaccttggctccccagccccactggccacaccagagcaacatcctcagccccagcaaaaaggaagaggaagggatgcaaattagtgggagtacccttgaattaagaagctctagggtcgggcatggttgctcgtgcctgtaatcccagcaccctgggaggctgaggcaggtggatggcttgagctcaggagttcgagaccagcctgggtgacatgacaaaaccctgtctctacaaaaaaaagcccacaaaaattaaccaggtgtggtggtgtgcacctgtagtcccagctactcaggaggctggggtgggaggattgctggagcctgggaggcagaagttgcagtaagctgtggtcatgccactgcactccagcctgggtgaccctgtctcaaaaaaataaaaaaataaataaataagttatctaacttaatggggatcttcagctgccttgaccttgctcacctgcgttgccatcttctggctactgtctttctctccctgtgcctcactgcttgacattccaattagaatattgtttctgtgaatgctgactgcaggcccaccagagaaatggccttggccatccatggataaacccagtctgcaatggcatattttttctcctcactttagtttttccctctactgataccactctgcaactgtcttcattcctagggcatgtaatttatcagtggaactcccagcagtatttcgggaaggaggtatttccttccttctcccttcccctcccctcccctcccctccccttcgacaatgtcttgctctgttgtccaggctggagtgcagtggtggcattatagctcactgtaacctcaaactcctgggctcaaatgatcgtcctccctcagcctcccaagtaactgtaactacaagcacacaccaccatgcctaactaatttgtttatttttttttagagatagggatcttactttgttgcccacactattctcaaactcctggcctcctcctagccatgcatggtgatggacgcctgtagtcccagctacttgggaggctgaggcaggagaattgcttgagcctgggaggttgaggctgcagtgagccatgatcatgccactgcactttgtcctgggtgacaaagcaatactctgtctcaaaaaaaaaaaaaagaaatgtgatcagattggatcatgtattcaaaactaatgagccttacgcattcccattggggtaacttacattcttctgttctgtgaaatactggctactgattttctaatgtctcatgtggcatcaaagcatgctgatgcagggtgaaagatggaaggcaggggaaggtttccccaactggtttatttctcatccacttgaaagaacaatgtcagaagtaaccgagtagacatcctgtagacattctacaaagtatagatctttagagctttttgaagtgaacattttctttatgctgtatgatcataattagtttataatcttactcattggggtggctctgaaataggaagcaagtaagtaagtatccatcttctaggggaacaggtgagtgatgaaaatagaatcacatcagagttggctggcgcgttggctcacgcctggaagcacatcagagtcggctgggcgcagtggctcacgcctgtaatcccagcactttgggaggctgaggcgggcgatcactaggtcaggagttcaagaccagcctggccaagatggtgaaaccccatctctactaaaaaaaaaagcaaaaattagccggttgtggtggtgtgtgccggtagtcccagctactcaggaagctgaggcagtagaatcacttgaacccgggaggcagaggttgcagtgagctgagatcaaaccactgcactccagcctggacaactgagtgagactccgtctccaaaaaaagcaaaaaacaaaaacaaaaaaaaacaaaaaaaacacccatgtcagagctctggtccctgatttggttggcactatcaatttagagattagaatctcataagaagaccccaggggaatcttttgccttctgttccatgttctcctccactgcaccggcctccatcccgtttccaccttcccaccctccattcccatcccctaggaacaaagtgtggaggttgatcaggtaagtatgtatcgagcactagcatgaagcttcactccactcattggcatgacgggcgggccgggggcagcagaaccagcataaacgtcattcctcctctcagggagcttgtgttaacaggcacgaaacagatgattctacctccttcgccttttgtaccaacttcagttgatagaggtgactggctggagtgctgtctcaagaaggattctggaatcacaagagagatcagtgaagaaagggctccttgttgattagcattgcctaccgtggcccaggatgggagaagataggttatttctttctttttttttttttttttttgagacggagtctcgctctgtcgcccaggctggagtgcagtggcgggatctcggctcactgcaagctccgcctcccgggttcacgccattctcctgcctcagcctcccaagtagctgggactacaggcgcccgccactacgcctggctaatttttttgtatttttagtagagacggggtttcaccgttttagccgggatggtctcgatctcctgacctcgtgatccgcccgcctcggcctcccaaagtgctgggattacaggcgtgagccaccgcgcccggccggttatttcttgaatatatggcatcctcgcactgtctaataaagtgttaaataaagtgttggtgggtggcagatgacagaagttgcagctgctgcgggtgagacctggatgagcttgaaaggggagtggacaggtggtgggagagcgttttggccaggacgtcacacaggcccagtgaccgggagtaggccagcaggggagccgttgcgaggcccactgaccgggagtaggccagcaggggagctgttgcgaggaacctctggctggagtgttgggtcagctgtggaggagaggtgggagattcagtgggaaagtgaggcaagagaggttatgaggaacaagagtggtggccatgaagctttccgaggtcaaccaacgagatccttccctgctttctcactatcaccacagacagagacttagcctaggccagaagctctttgagggcagagtggttgtatctggatataatagactttctttttcttttctttctttttttttttttttttttttttgagatggggtttcgctcttgttgcccaggctgtagtgcaatggtacgatctcggctcactgcaacttccgcctcccaggttcaagtgattctcctacctcagcctcccgagtagctgggattacaggcacccgccaccacgcctggctaattttttgtgtttttagtgaagacggggtttctctatgttggtcaggctggtctcaaactcccgaccacaggtgatccacccgccccggcttcccaaagtgctgggattacaggtgtgagcccccacgttgggcctataatagactttcaataacaaaagcctttgagtaaaatgtcaattttctcctattcctgctaattggtggtatgtgtggttcttgtctttttcttccttaccattatataaatacatttttaaaacacagctggattcctatagccttaaacggcaacctaaaaagatgcaacatgtcaggagtggtgggaacccttcccattcttcacacagcacagctgtgcaggcagcagttactgcagctctgctggatcctcacaggtgatgacacaattcaacggaacaattacagggatgtttgaatgggaaatcggagaaaaattgcaactctcatccccactgtggcctgaggcaagtctggagctgctcataccctgttttggtttttgttttttttttccagatatcaagtcttgctctgttgcccaggctggaatgcagtggtgtgagctgggctcacagcaacctccgcctcctgagttcaagtgattctctgcctcaggtctcagccttccaagtagctgggattacaggcatgcgccaccacccccagctaattttttttttttttttttttctgagacagagtctcactttgttgcccaggctggagggcagtggtgcagtctcagctcactgcaagctccgcctcccgggttcatgccattctcctgcctcagcctctgaagtagctgggactacgggcacccgccatcatgcccggctaattttttttttgtatttttagtagagacggggtttcaacgtgttaggatggtcttgatctcctgaccttgtgatccgcctgccttggcctcccaaagtgctgggattacaggcatgagccactgtgcctggcccacaccacgctaatttttgtatttttagtagagacggggttttgccatgttggccaggctggtctcgaactcctggcctcaagtgatccgccgcctgggcctcccaaagtgttgggattacaggcatgagccaccgcacccggcccacacccggctaatttttgtatttttagtagagacggggttttgccatgttggccaggctggtctcgaactcctgtcctcaagtgatctgcccgcctcggcctcccacagtgctgggattacaggcttgagccaccacactctgcccgtaccctctcttttcctaagatttttttaaacctttgattctggaagttctaagaaaaaactaaatcggaggagaaagaaaccattataacacatttcacagtttctctttgtttaggcatctgtctcttgggcacatttaggttcgtgatgtctaaatatgtgctgacatcataacctttttgtttttaggaagtagagtgcttaaaggcttgaagcttagagccaggctgcttagtttttaatcgtggctctcctgttttcttgctgtattactctggacaaggtactcaacttttctgtacttaactctttgaaaatgaggatagtaataatacatactatgtaagtttattgtaaaaagtaaatgagctgggcgcagtgagtggctcacacctgtaatcccagcactttgggaggccaaggtgggtggatcacctgaggtcaggatgtcgagaccagcctgggcaacatggtgaaaccctgtctctactgaaaataaaagttagctgggcatggtggcgtgtgcctgtagtcccagctacatgggaggctgacgcaggagaattgcttgaaccctgaagatggaggttgcagtgggccaagatcatgccgctgcactccagcctgggccaacagagcaagactctgtctcaaaaaaaaaaaaaaaaaaaaaaaaaggaaatgaagttcagtgagatgggtataaagcatggacataatacctggtgcatctcaagtgttcagaaaacgatcactatcatgatttagggttttcctttttggaggggtaaacagtactaatatgatagaaggattagtttcttactttagtattggagtctaggctcagctctgccacagactttgtgagaaactttctaggacttaattttctcatcttttagcgggaccagtaataccctatcttgcttacaggggtttggagtccaatatgataatgaaatgccttgaaaagtataaagcacaaatgtcaatcgacttagagattagaatctcatatgtcagattttattactgctgttgtaggagtggtggtggtagtgaatgatgatattgattaaaatcgatccgattttaagttttaaatgcagtaggaatgattacttgtggcagtagtttatgtacattgcaaacgagcacatttgctttacttttcttgaagtaaaataacatttttggtttttttttttcctcctaggaacctcggagagctgatagatcggtttgtggctgatttcaaagcccaggggccacctaagcccaacactgatgaagggggtgccgtgctccccagctgcgccgacctctttgtctactacaagaagtgcatggtgcaatgctctcagctcagtactggggagcccatgatcgccctgaccaccattttccagaagtacctccgagaatacgcctggaaaatcctctctggcaacctgcccaagtgagtcctgttcttcatagtctgagtggtggcaaatagacctaaatatgggaatcttaaggaaatccactctgaagttgtttactaaaccaccaagagtatcaaggaggaaagcacgcttcctgagttcccgagggcctgaagctatttcctctctgacattccacagctgatcaagaccatcagaggaaatgtccacactgactgcccacgtgggcaaatcttaccacggtggactcgagaaccaatcccattgtatgcctatttaattttcatggattcagctatagatacttggcacatacaaaaaaagtgaggttgtggtggaaataactgataaatagcttaagcagtttcacccaagcctcttttggtgagatgatgccccggagtgatgggttggaggaatgaatctgctttttcctcattcccagtaggttccaagtccctcttgtggtgcacacttcctgccatgctggacagagcctaatgtttcagatgcggtaggattgggggtcagctactgcatagctcctaattatggggactattgtgttatcctgaggcattagaactggacatagcctaatgtttgaagatgcggtaggattgggggcagccgaggcaggaggatcacttgaggtcaggagtttgagaccagcctggctaatatggtgaaaccccatctctactaaaaatacaaaaatcagctgggtgtggtggtgcatgcctgtagtcccggctgctcgggaggctgaggcaggagaatcacttgaacccgggaggcggaggttgcgctgagccgagattgtgccattgcactccagcctgggcattgcagggagactccgccctaaaaaataaataaataaataaataaattatgtataatcccactacccaaagagaacgtaactttttgtatatatttttccgttcttgatagatacctaatgtgtgtgatctgtgtgcttttgtttgtttgtgtcacggaattggggctatactgcttatagctttattccctgcagctaccgtttaacttcatcgtgggagcattttcccacgtgtattagtcagcatctcagcagaaaaaaatggcatactcagctgggattatgtcagtagagagactgttcacagaagtgggggcaaggtgaaaggagccaacagaggattccaaagcatccagatatgagtgggtagtggttactaccatagaactcactcagtagctggggctgccccaaaacctgtagtcacaggaggatgtgtgatgggtgttggcctcttgagacacttagggccttgggcaggaagcatgtcttaacattcgcttatgtcctcctccacaagcacacatgagtccccttgcagacttctcttaacattcgcttatatcctcctccaccagcacacacgagtcccagtgcagacttttcttaacattcacttatgtcctcctccacaaacacacatgagttccagtgcagacttctcttaacatgcgcttatgtcctcctccaccagcacacatgagtcccagtgcagacttttcttaactgaaagaaacagggtaggtaaccatctttcgtgctccacacggtcctaaatgagttctgcacatcaggagattccaagctaaagagaggacagctcagcagccttccctttggatattagaccatcctagttaatgtgactaatggcctgctgatgattcagattaactaaaataggaatcatctcttcctatttctgacggtgtcaaggtaaggtcagtaggaaaaggactcattgtatgtgaattgatttgggccatgtccagcctttacttcccccttttctgtatcttaaaataatgtagtttccagttcaggaagcaaattagaaattccatgctgacttgttcctgttccttttcttcagaaccacaaccagcagtggaggactgactatcagcagcctcctcaaggaaaaggagggctcagaagtagccaagttcactctggaggagctctgcctcatctgtaacatcctgagcacggcagagtactgtctggccaccacccagcaggtgagccatcctggctgcccactcaccacctccttttcctgaaccctctgggctgcgtcgctcggcgagtaagaatatacgtcctaacatggccacagacaaccttgggtcagaccagttggcctgccacagaggaaagctcagtgtccagccataaggctgcccaggcagctgtcttacagaaaggccttgttaaaagaagactgggcaagaaagtatgactggtcacctccctggagttgtgtaagctcctcaaagggcatgacctgttaaaagtaggtcagtagcactccaacccatatgagaaaagcagtaacaagcttgtctgtgctaggacccagcctttggtgatgatgagtcacagccagttattccatgctcagaagtgttactaagttaagcagaatcctttgggcttttatgtgtcttctgaaatttacatggcattttcaatctgcctcaacaaatagccattgtttgggatgctgacgtttaggaactgggggacaggaaagggtgatgcctctgctggaggcccccacatggccatagttcagcaactgatggagcagaaggaagacccagaataacctttgattcagccttaaacatggaattagaagtccttttcacacttggtctgggattcccctgaggccaagagaaagaaagtaatttggaaaggttctgctcttctacccactttgtatttataatttacagatgcctagaccacaagaagacagtcataaatgatagttcagacagcccagcttggagctcctgtgtgccagggcagcaatatagcaggtcaaataggaagtgtgtctaccaaggcccctcagtggcacataagccagccagaggcagaggcagcagcacactctgcctggggacctggtcatgttgagttgcgaaggtcatgaccttccagggtttggccttggagccacagagcagtccgtttagccccaggccactccccaggtaagatggcactatctgtaaggacctccaaggcaggggttccagagttctttcatgaagaaacactgtttaactattttgggtgtgcacagaaagaaatacgatacatgtaaatatgctattttaaaggtaaaataaccgtagtatttaaaaaaataaagatcccttttaatcccatcatcctcaaataatcatattagcaatttggggtattttttcaattgttattcatagacatagttttgaatgttacaatcttaattcactgttatatccttttattgttagtgtcatacatagcattagcatttctcctgtcattataatgatagtaataatcataactatcattacagggtcattattactatcattgtttatggccacataatatttctctttaagggactataccataaattatttatttatttatttattttgagacagagtcttgctctgtcttccaggctggagtgcagtggccatgatcttggctcattgcagcctccacctcccaggttcaagcaattcttctgcctcagcctcctgagtagctgggattatagatgcccatcaccatccccggctaatttttgtattttttttttttttttagtagagatggggtttcaccatcttggccaggctgatctccaactcttgaccttgtgatccacctgccttggcctcccaaagtgctgggattacaggtgtgagcccctgtgcccggccttgtaccataacttatttagcaagcatccctgatcgttgtttatagtgcttcaaattttgctttttttttgaaacagagtctctctctgtcacccaggctggagtgcagtggcacgatctcggctcactgcaagctccccctgccgggttctcgccattctcctgcctcagcctcgcgagtagctgggactacgggttcccatcaccacgcctggctaatttttttttatttttagtagaggccgggtttcactgtgttagccaggatagtctcgatctcctgatcttgtgatctgcccgtcttggcctcccaaagtgctgggattacagacgtgagccactgtgagtagctgggactacaggcacccgctaccacacacagctaattttttgtatttttagtagagacggggtttcactgtgttagccaggatggtctcaatctcctgacctcgtgatccactcaccttggccttccaaagtgctgggattataggcgtgagccaccatgcccagccaaaattttgcttttatagataatcctggcagggtacagtggctcacgcctgtaatcctagcatattgggaagccaaggtggaaggatcgcttgaggccaatagtccaagaccagcctgggtaacatagtgagacctggtctttacaaaaaatttaaaagttagttgagtgtggtggtacatgcctgtggtctcagctacttgggaagctgaggttggaggatcgcttgagcctgggaggtcaaagctgcagtgagctatgatcacaccactgcactccagcctgggtgacagagtgagaccctgtctctaaaaaaaaaaaaaaaaaaaaagataatccttacaaagaatgtctttctgaatatagcatcttaaatgttttgcattagttttctagaacagactcttagaagttctagaaataagttgaagaccattttgatgactgatgatacaagtggccaattattttttatttagtgaaaattgtttttattgattacaaaagtaatacattcttagcacctttattgtgatctctaaatacaattttccactaaaagaaaccagagattcctggagaaatgactaattccaggtcaagggcaggaaatctacaagatgaatcagaacatcatgttacacaaaaagcaagaaaaatatcaaagactattagtgtcatctcaagaggacccagggagatatagtgggttgaagtgtccccccaaccccaaaatatgtccaagtcctaggccttgggacatgtaaatgtgactttatcttggtaaatgtaattaagtatctcaagatgagatggtcctggatttaggattggtggggggccttatctaatgactgttgtccttagaaaggagagagagattgaacacacagagatacagggaagaaggccgtgagaaggaggcagaggctggagtcagacttctatgagccaaggaacatcaaggattgccagcaaacacccaaagctagaagagaggtgtaaatagttttttcctcagagcttccagaagagtgggggcgcggtggctcatgcctataatcccagcactttgggaggctgaggagggtggatcacttgaggtcaggagtttaagaccagtctcgtcaacatggcaaaaccccgtctctactaaaagaatacaaaaattagccgggtgtggtggcttctcacttggcagtctcattccccaagcctcaggtccccgcttcagtatcacctcctcagagagcccctcctggccaccccccttcagcagagaggccctcctggccaccccccttcagtaggtagctcccttattccagcactgccaaatttatttcctaacaccacaaaaccgaagttacgtctcggctggcttacttccttattatctggcgcccccattagttttaagttacatgccagaaagtctactttgttcacctctgttcattagcaccaaatacaatgcctggtacgtaataagtgcttaataaagatctcttgaaggaataaaagagcccactcctgagataatggcattaacccatgatgatgccagagccctcatgacctcatacctctcaacactgtggcttcagggattaagcttataacccataaactttggagaacacaatcaaaccacagaacgatgttatgaattgctattgtaaatagtttttaaaaaacataaactacacttttaaggatacttttacatttacagaaaaattgcaaagatcgtttgtatggttcccatataccacttacccagtttcccatattattaacattgatatgaaatatttgttacaattaatgaaccaataatgatgtattattggtgttgcttttaaattttattttccaattccttgttgctcagattctttttgtttaatatggggtctcaatctgttgcccaggctggagtgcggtggtttgatcacagctcactgaaacctggaacgaaagcgatcctaccctcagcctcccaagtggctgggactacactgggacttcaggcacctgccaccatgcctggccagtatttttttattttttgtagagatagggtctcactgtgttgctcaggctggtcttgagctcctgggctcaagtgatcttcttgcctcagcccccaaagagttgggattaccgggtgagccactgggtccagcctgctcagattattaagtctctggtttcttcttccatttccctttgccccctctgcaatcttttcttaaagaaactgtgttgtttgccctgtagattttcccaagttttggattttcctgattgcacccacgagtattaatggacattttactttgtctcgtatttcccataaattggtagttagatgtagaagcctgagctgattcagattcttttttacagaaaactacatcataatgatgttttgtacgtctgtcatcaagatacataatgtttggttgctctttgtgtgatgtcagcagcctctgatgctcaaagcccagatccattattccattaggaggtataaagaatgatactctggccgagtgcaggggctcacgcctgtaatcccagcactttgggaggccgaggtgggtggatcacctgaggtcaggagttcgagaccagcctggccaacatagtaaaacccccgtctctactaaaaatacaaaaattagggccgggcgtggtggctcacgtctgtaatcccagcactttgggaggctgaggcgggtagatcacgaggtcaggagtttgagaccagcatggccaacatgtggccaaaaagtgaggagcctggagggcttagaaagtgggggtgcggcaaagcaaggcagtgggtcagcagggctgagcaggccatgtttcagggagaggaataaggaagtgtgaagtatgaaggtcctgagggcgaaggaccctggtgtctcccagaaatttaaaaggccagtgtaactgaagcctagcaggcaaggtggaaagtggcaagacggggccagaaagctgggcaggacccaattcatggttaggaatttggattttattttcggtgtcataggaagaggctgctgaagagtttaagcatgataagcctgtgccataatttgttttatcctttgtaaatacacatgtagattgtttccagctttatgagaacagtattgatctgttttgttcactaaataactctcttattctgttacacagcctgaacaaagcgggctctcattaaatattggttgaattaatgaatgctgcaaaaaatacttgcatatctttgtatgttattctccttatttcattgaaatgcatttctagttgtgaaattgctggtttaggcaatatgtgtatttaaagttttgctttttgaataaattgccttccaaaaagtttatgctaatttatgcaccccaacagcattttcaaatttaagacaaaacattggttattctgtcctggcacggtggctcacacctgtaatcccagctgtagtcccagctactcagtgctttgggacacggaggtgggtggatcacctgaggtcaggagttcaagaccatcctggctgatatggtgaaaccccgtctctactaaaaatacgaaattagccggacatggtgatgcacgcctgtagtcccagctactcgggaggctgaggcaggagaatcacttaaaccctggaggcagaggttgcagtgagccaagatcgtaccattgcactccagcctgggcaacaagagtgaaactccgtctcaaaaaaaaaggccaaaacattagctattcttagagtttgtgtaataggtttacagtgctagattaatcaactcccagggatatctccaagtatttacaagtcttggtcccgttatttttctttgagcgccaggagcgtgttgagtgtttctgtccccggctgtcggctgatgatggcagggaccacatttcttttgtttaccactgtatccccaatgccttaatgaggtgcttggcccgtagtagcattcactgactattttagctggttttactgctactcaacaccaaaggtttccattgtgggtgggcaagtctgtagttcatggggcagggagtatcttaaaatcagcgtcttttcagaatgagttgatgtgaattattgatgtgtggtaagaaacaagtactgcacagtgctaaagggcacaggctctggaggaagtttgattcctggccctaccacttctatcttgggtaggccccccctctatttttctgatctgtaaaatgacgatgataataatagaatcttcctcataaggttgtaagattggccaggcacagtggctcacacttgtaatctcagcactttgggaggccaaggcaggcaggtcacctgaggttgggagtttgagaccggcctgaccaacatggtgaaaccccatctctactaaaaatataaaattagccgggtgtggtagcgcacgcctgtagtcccagctactcgggaggctgaggcaggagaattgcttgaacccaggaggcagaggatgcagtgagccgaggtcgcaccactgcactccagcctaggcaacaagagcgagtctcaaaaaaaaaaaaaaaaaaagtgtatggaattatgcctgaatcatcaaacgcagtaaatgttaactattattgtgatggtacttctttggataatcattaaccgtgcatccatttcttctgtttttcaacagctagaagaaaaactcaaagaaaaagtggatgtaagtctgattgaacgaatcaatctgactggagagatggacacgttcagcacgtatgtaccctgcacacacttactggctgcctgccctttctccactacacagcagcgtgcagcacgtatgtaccctgcacacgcttgctcgctgcctgccctttctccactacacagcagcatgtggcacgtatataccttgtacacgcttgctcactgcctgccctttctccactacacagcagcgtgcggcacgtatataccttgtacacgcttgctcactgcctgccctttctccactacacagcagcatgtggcacgtatataccttgtacacacttgctcgctgcctgccctttctccactacacagcagcatgtggcacgtatataccttgtacacgcttgctcactgcctgccctttctccactacacagcagcgtgcggcacgtatataccttgtacacgcttgctcactgcctgccctttctccactacacagcagcgtgcggcacgtatataccttgtacacacttgctcgctgcctgccctttctccactacacagcagcgtgcctcaggctgttggctttagtcactacagaacctaagaggtttctgttgggtcagaatgagtccctactggccactaagaagaagcttcagaactgggctgccattgtacctcctcagatgcagttgctcttttagcttatggggtcttcattgtctcactgtgaagaataaccacagagaagacattctcccttggccattgctgatctgcccccacctaaacccacagaaggccaggcctaccttcagtgttttaaagtataaagtataaatggcttaaatttagccaccgagggaataagagtgtgggagtggcaggggaggtccgtccaggaagttctaacagtaaagtcttctttccctgttaggaccttgtggtatttttgttgtggtcagtttctgttccactgccattaaatgagacaggcatgggccaggcctcagctttcacatcaaccacttattgacgaagaatcaaaattctcagctttcacatcaaccacttattgacgaagaatcaaaattctcagctttcacatcaaccacttattgacgaagaatcaaaattctcttcttagtttatttcctccacttttcttagctttttattttcttcagttctgacttaaacatttttgggaagcaggttctttgggaggaagatgtgaacagggatactggggtggtgattagggagactgaccgtgggattctatatcctgactgggtgaggacacacccagataaaaccaggacatgaagaaagagccaagctgttcctccgctgtcattaattaaagctcaaactttgccagtgaaatgatgaatctgatttttacacaggggcctgagtgtcagtcattcagacggccgttgtttgaaagggtgaccacagtgatttgtttgatttgcagcgtcatctccagcagtattcagctgctggttcaggatctggatgctgcctgtgatcctgccctgactgccatgagcaaggtaaggtcttgggaaatggcatcctacaaactaacgagagcagcccaaggtggcttctactggcccttgtctgtagcttctccaggctcatcggagcgtaaaggatcagctgaggagaatggagaggccccggagttcctgaaagcactcagttagtgtcgcacctgcgtcagttcagttgcttgtccttttagaatgagacagagcatcacagtattggaggatggcaaaaaaaaaagagacgaagtaaatgtgtttgatgagtctaaaggagatgttgtctgtggtttatttatatttttttagagacagggtctctctctgtcactcaggctggagtgcagtggtgccaccatgactccctgcagccttgaccctctgggctcatcagtcctcctgcctcagcctcccaagtagctgagaccacaggtgcatgccactgtgtccaactactttttaaattttttgtagagctaagagtcttgctatgttgcccaggctggtcctgaactcctggcgtcaagcagtcttcccaccgagtcctccccaagtgctgggattacaggcatgagccacagtgcccagctgagatggatcatttttaattactgagcgctacctcatgttcctctcatgttcctatttttggcttttatgtgcctatgcctttttttcccaaatgaatgtcaattccgtaagtgcacagaccatgtctttcacccctcttttatctctcatgtagtcttgaatatgggagattcatttttgttaattaaaaaccaatcagccatgtcctttatttacgtattatctttgattagtatctgacacatgctaaaaaccttggtgtggtctcaccagaatgggtgttttcattagtgcttaaagtagtaacttctgactcattcttcattcttgcccactgagaggtttttccaactccttctgagctctggtgccaatgtaagagtatttgatcaggttgtgaactctggttttctaatatcgtggtggcccatcagtcagcccttggccctcaagtctcctcctttggcacttactgagcgctacctcatcttcctatttttgacttttatgtgcctatgcctttttttcccaaatgaatgtcaattccgtaagtgcacagaccatgtctttcaccccctcttttatctctcttgtagtcttgaatatgggagattcatttttgttaattaagttggaaatgggcctttgttatgctaaacccaagtaacatgcagctgcaactctagaactttgtagagcaggggttggcaaactagagcctgggaaccagatctggcccactgcttgtatttgaaaataaagttttattggaatacagccatgttcctttatttatgtattatctatggctgcctttttgcaatatagtggtagaattgagccattgcaacagagactagcccacaaagctaaaaaaattaaatatttactgtctggccctttacagaaaaagtttgccaatgtctgctctagagtcataggctcttgtagcaaattctggagaaacaatttatctaggttatactggccagtaccagagggcagtgggaggaacactaactttagagtcagacagacctaactcctccagggtttcctttggggtgttgagcaaatgattcacctgtctgggccaacgtgacatcatctgggcccacataccccaagtgaactgtggatctctgcctcccagcattgctgtgaggatgaaacatggaacgggcgggtctagtgccaggcacatagtaaatgctcattaaatgttagttccctctccctcttgtcaggaggaatgaccatgtcacaaggttgtgtaagcagacatttggtctgaatttggttttgcagtagattgtaaatatttaacaaaaataagattaaaaccaaaatgtaggctttagggttttatgaactgaagtggcaagtcctaaaatagctgatgtcacagttttattcaaaaagctgatcttttcagcagtccggtgctgatgggtacttccagtattctcagcattcacaggagaacactctgagcaggcaaagtgaggccagtccatctgcttagaggattcgttttgccagctctcatgatcccctcgctgctggtaagcattctctacatcctgagtgggatctgtgccagctgccatctctcctgaactgccacacacttcagatcggaatgcagctgccgaaagaattttcacattcaccaaaggaagagtgggatttttttttttcaataaaatcacggttggaaggggtttaacactgcaagtgttgcttatacgaactgtcggttcgttcggtggatttccctcaaaccctgccccgtcccaccctccacttctgccccgtgcccacaccagcaaatacgaacagagaccgtgcctccagagtcctttgtttatatcataggaaaaccacagacttgggaacgcagcagctgggaggccattactttttgtctgagtcttctggagttctagcaaaataaaatccatgtgatggaaataaacaagccaagtggtcacaaattgattcaacacacattctgtgttcttgatgcctgcatcctgttttgtgtagtttcttctaggatttaaaaaaacttttgtgataatggttatttctgtctctgattctatcatttttgctgctggttaaacagttcagttcagaccctgcccagcacagtgctgggagctgcaaggctcagaaaggcataaacccttggctaaggtgtttagattccagtagctgagggcaagagatgtgtaagatgacagcaatacccagtaactttaatataagagatgaggaaatcagtgccataagaaaagtacaaaatacaccctttttaaagagggaggagttcatatccaggtggggaggcaaagaaggccctcgtaaggaagtggtgtttgaaacagatgagggcgaaattctgaatgagtttgtgattagtagggcagttcaaacagggtgaaaacatgagtaaagagaggttagggaagctaaagagcttggttcaaactgccaatctcattcaacatcccaggggctcctcaggctactcctgtacttggactgacagagttaagattggaaacgagactgtcctcaaggagtctataccctgctgggaagaaaactgagaacaaccaatactgtaaataagtgtatcttataaatgtcagaaggactgttggctggccaaagtggagtgtagtcgttggatatttccagaaggactgttggctggccaaagtggagtgtagtcgttggatgattccagaaggactgttggctggccaaagtggagtgtagttgttggatgattccagaaggactgttggctggccaaagtggagtgtagtcgttggatatttccagaaggactgttggctggccaaagtggagtgtagtcattggatgattccagaaggactgttggctggccaaagtggagtgtagtcattggatgattctgagttgacggaaggagacttccttgacaagagggattgagcctggcaacttggttaagtcattttcctgggagacctcattctcatggaaggcatcccatggcctcttccttggttggcatatagagctttcattatctatctctttactccactgctaggtcagtttctgccgctcactccggagtatgtgccctgttctccagtcgcagccatgtttacttccctgaatgcatattgctcttttgcggcttccatgccttttctcattttattctttctgcccagaattttcttcctgctatcgtctgcccaaggagcacgtcctttaagatcaagttcaaatgtctgtccccatttaaaaacctgaggtataattcatataccacagaattcacccttttaaagtatacagttggccaggagcagtggctcactcctttgggaggctgaggagtgcaaatcatctgaggttaggagttcgaggccagcatggtgggaccctgtctctattaaaaacacaaaaaatttgctggacatgatggcacacacctatagtcccagctactcaggaggctgaggtaggagaatctcttgaacctgggaggccgaggttgtagtgagccaagattgcagcactgcactccagcctgggtgacagagtgagactctattttataaataaataaataaagtgtacaatttagttgtttttagtatatccacaatgtcatgaaaccaccaccaccatctaattccagaacatcttcattaccccaaaaagaaaccccgtacctctcagcagtcattctacattcccctgacaaccattagcctactttctgtctctatagatttgcccctcctgacattttgcatacctagaatcatatggcatgtgggacatcttgtgcttggctttcttcacttagcgtagtgttttcagggcatgtgcatggtggggcatgtgtcagcactccattcctttttgtggctgagtaacattccatcatatggatagaccacattttgtttattcattcgtctattggacgtttgagttatttctactttctaattttgaataatgctgtgaacattcatgtacaatttttcgtgtgaacatgttttcagttctcttcaatatgtacctaaaggccaggcgtggtggctcatgcccgtaatcccagcacgttgggaggccgaggtgggcagatcacctgaggtcaggagttcaagaccagcctggccaacatggcgaaaccctgtctctaataaaaatacaaaaattagccgggtgtggtagcgtgcgtgcctgtaatcccagctacttgggaggctgagacaggagaatggcttgaacctgggaggtggagattgcagtgagccaagattgcaccactgcactccagcctgggtgacagagggagactctgtctcaaaaaaaaaaaaaaaaaaaaaaggatctaagggacctaaggaatggaactgaaagagccgtatggtcaatttatgtttaacattttgagaaagtgccacactgttttctgaagtgactgtgccgttgtacctttccacagcaaagtgtaaggaatccagtttctccacatcttctcccacacttgttttccttttttaattatagccattttcgtgggtgtgaagtggtatctcattgtgattacagtttgcattccttgcatgactaatatgttgatcaccttctcagatgctactggcgatttgtatattctctttgaagaaatgagaattaaatgttttgcccattttaaaattgggttgtctttctgttgttgaattgtaaaagttctttttatatctggatactagaccccttatcagatatgaaatttgtaaatattctctcccattctgtgggtgggttgccttttcactttcttgataatgtccttgattttctgaagttggtatatcgtgtgtgtgtgtgtgtgtgtgtgtgtgtgtgtgtgtgtgtgtgtgtgagatatctaagataccattgcctgatccagaatcataaagatttactctgtggtttcttctaagaaatttaggtcttcacaaaaaagaaaaaaaggaaaaaaatgtaggtcttcaatccatttcgagttaatttttgcatatggtgtgaggcaaagattcagcagcattcttttgctgaaaggatactcagctttcccagcactatttgttgaaacgactattcttttcacattggatgatcttgataccctcgtaaaaaatcagttaaccatagatgtgtgggattatttctggactctcagttctattccatctatctgtatgtccaccctcaggccagtaccacactgtttggctataatagctttgtagtaatctttgaaatcaagaagtatgagtcttccaactttgttctttttcaacactgttttggctcttctaggtcccttacaatgtcagcatttcttgcctcagccagagcatatttatttctctttcaagacaccatagtacctagactacctttctgctttgttatgtaatcatttttatgtctttgtcttccctattaaactttgaacaacttgagggctgtgtcttattcattttggaaacccgtggcatggcacagtacttgcttaactgtagtattccctgaatgactttgaaggtaaagagggagccagggagtgggagagaaagaaccaaaggaccacaaacacacttttgaccaaagattggtaaacaagtgagacatagataactctactgagcagaggtagccaggtggagctggtagatgtagagtaggaaacttggacaactttgtgagagacggtggggtcatagaatccctgaaacctttaggtccatagctggtgctgttgaggatggagtgatgctcctcaatggcacctgatagcagaagggcttctgacttcagcaggtggcatcctggagccgattgaagagatgtgggaatgaaggaatacgagcccgcgggggtgtggccctgagtcctgctgctagacaaggagagggaaatgcagagcggtagtttgctagattcacatgcaggtgcagccttctgcaggccaggccgaagaagggggaggaaaatgtgatgaaagtcaggtggtccctctgaaactctgactttgagattccagtagtgttgctgatgagttacagcaaaattaacttctagaccacgtttccttcccatagtgttattttctttctttcataaaaaaatttcttcactctgttgcccaggcttgggtgcggtggcataatcatagcttactgcagccttgacctcctgggttccagtgatcctctcaccctagcctcccaaatagctggtactactggcgcacaccaccacacctggctaattttcttgatttttagtagagatgaggtcttgctatgttgcccaggccagtctcaaactcctgagctctagtgatcctcccacctcggcctcccaaaatgctggaattacaggtgtgagccactgtgcctggcctccatattgcttattttcttagataacctgtatgagttgataataagttactatttactgagcacttaccaggaattggaacccaattaatttcattctaacaataaattcatcagatggctatgctatttccccttttcacagataaagaagctgaaacagagacattaaatcacctgctccagatcttttagctacttgggaggctaaggtgggaaggtcacttgagcctgagaggcagaggttgcagtgagctgtgatcacgccaccacagtgcctctttatgcaggattgtggcatgccatacagagagagtgagtaagtctttttggcaaatgtggcaactgaggcaaaatcagcttaagtaacctgcctaaaagtggaagagcctcggcctcctaaactgctgggattgcaagcatgttgccatcgtgcccgaccagatgtttttgaaaaaaggaataaaatttaaatcaccataatttcaattagttgatacatttctgtcagcatgtgcccagtcctggtgggtccacacgagtgttcatgctgatatgattatgagttcttcaagcattcaccatcatcatggtgtatattcatctccagcttttcttgatctgacaccaggacttttctacagtggagaagatgtgttgaacagccaacccacatattccaatctgcgttgaatatttttccctgaaaactaatgaactttccttctggtatcttctttccttccttcctcccttcctccctccctccctccctgccttcctcactccctccctccctcccttcctccctctctccgttcctcccttcctcccactctcccttccttccttctttcctctctccctcccttcccctgtcccctcccctccctccagactcccttccctccctccaaactcccctccttccctccctccttccctccttccctccctccctccctccctccctccctccctcccttccttccttccttccttccttccttccttctcttcttcatattatgcccaaagccatataacttataatagtgaagctagaagtaaaactagttctcctgattctggaaaaagtagttatttggagtgttttggtggaaatacaaaggattctatcttttagatttaaatcctacaaatccttagaaatgagtatgtctggttatgcccctgtacgtaggatagagagccgtgggctccctagcaggggctgttggtctcatggtccccgcctctctccgtgccttttcctagggctgctcacatcactcaggtaaataaatccaagtctctgttcagaagcaaacacacctagtgttttgcctattaatggtagttttaggaaaaaacagaaactgaataaattaaattttcttaccgtctggcacataatttatattaggtttcaggattgtgaacatgtacccatttaggaggctgcgttataatcccccaaagacactttgaaacaggtagaagagttctcaagtctgttctcattttcctcagtcattaaaatgcagatctgtttcagaaggaccatggaaagccacagctaagaaatcctcaagttcacttctacgttgaatcaagacaagtctgttctcattttcattttcctcagtcattaaaatgcacatctgtttcagaaggcccacagaaagccatgactaagaaactgtcaagttctacctagaatcaagacacagctttctttttcataaaaaagatttttcccattatgacaaaactaaatcacttccattttagaaaaatgcagattttttttttttttttttgacagagtctcgctctatccggcaggctggagtgcagtggcgtgatttgtgcttatggcaacctccgcctcccaggttcaagtgattctcctgcctcagcctcccaagtagctgggattgcaggtgcctgccaccacacccggctaattttgtatttttggtagagacggggtttcacagtgttggccaggctggtctcgaattcctggcctcaagtgatccacctgccttggcctcccaaactgctgggattacaggcatgttgccatcgcgcccggtcagatttttttgaaaaaaagaataaaacttaaatcaccataatttcaattaattgatacatatctgaattaattgataattatcagttatcgaaatttagtgatttttagtgatagtgcaagtattcttaaaattataacagtagctaaaatttactgtggaatttatacgtgctgcgagacactgtgttaagagcattccatgcgttatctttcagtaatagattatagatgttaccatcatcccaattttatagacgagaatactgaggctcagagaaattagatgacttgtcccggtcacccctttagaaggttgcacagtgtcagaagtcagactggctgactcaatttcagcatcttaagtaccatcttaatgacctttcctgctaacttagcagttacgcttccttaggcaggtcactcgctgtcctcaatcctgtttcatcctcatttattattactcacaaagaggagtaataatacctctttcactacatgattcattcatcaggcagcaaggtcatgtgaaaatgtcaggcacagcacctgttacgtggtaggtgcttgataaacgttccttcagcgcccagtgcgtagtaggtgcttgagaaacgttccttcagtgcgtggtaggtgcttgataaacattccttcagcccctggtgcgtggtaggtgcttgataaacgttccttcagcccctggtgcatggtaggtgcttgataaacattccttcagcgcctggtgcgtagtaggtgcttgataaacgttccttcagtgcgtggtaggtgcttgataaacattccttcagtgcgtagtacgtgcttgataaacattccttcagcccctggtgcgtggtaggtccttgataaacgttccttcagtgcgtggtaggtgcttgataaacgttccttcagcgcccggtgcgtggtaggtccttgataaacattccttcagtgcgtagtcggtgcttgataaacattccttcagcccctggtgcgtggtaggtgcttgataaacattccttcagcgcccggtgcgtggtaggtccttgataaacattccttcagtgcgtagtcggtgcttgataaacgttccttcagcacctggtgcgtggtaggtgcttgataaacattccttcagtgcgtggtaggtgcttgataaacattccttcagtgcgtagtaggtgcttgataaacattctttcagcccctggtgcatggtaggtgcttgataaacgttccttcagtgcctggtgcatggtaggtgcttgataaacattccttcagtgcgtagtaggtgcttgataaacattccttcagcccctggtgcatggtagatgcttgacaaacattccttcagtgtgtggcaggcggttgataaacattccttcatctctttggtctccacctgatgctcagtgccctgctgcacttgccgaaggtacctataaatatagcagatgctgcgggagtgaaagccccaccaggcatcagagtgagagtgagcgtgtacgtgtgtgcctgagtaaagtctacagcttgaggccaacaccccggcagcctcagttatgagacttcagttgcctgaaatgttcccagagcccagctgtctgagtctatgctctgtgtctctctaatccagtgaagaagtaggaatttaagtattcacattttcaagaaacctctttccaagcttcctatagcaataggaaaaaacaagatccactgaagctagttgtggagcgctgttctctggtcaaagttcctgctacagtagactctctctagaaagagtgctgaccccccagccccactgtggagcgtcagtcagagcacatacttcctgcccaggccgcagaagctgggctctggggacactctgggccctgcagtctcttcttgtggtggttaaactaggtcccggaggcactcatcattcttactgtcttcaaactgtgtctcatttagatagtagtaccagttgaacgccatctgtattcaactctacccaagcccccaaaacaaaaagcacaacaagaaacaattttaagtgtagaggggtaacttctaaatgtcaaatgaaaagtttacctggaaaagttgaggtctcatttctactgatggcttttcatgatgtttgttcttccaatgcaaggtactgtttgtttccttttttgaaagagttctttgggccaggcgtggtagctcacacctgtaatcccagcactttgggaggctgaggcaggaggattgcttgaacccaggagttcaagaccagtctgggcaacacggtgagacccctgtctctacaaaaagtaaaaaagaaaaaaatatatttttttaattagctgagcatggtagtgtacacctgtggtcccagctacttgggaggcagagctgggaggattgctggagcccaggaagtcaaggctgcagtgaactatgattgtaccactgcactccagcctgggcagcagagactctgtctcaaaaaaaaatgaaaaataaagagtcctttgcttgatcactatgtttcattagcgtctccttgagaaacaggccttacctttaacgaaggcctagttaagtgcttttattctttttttgggcagggtggcgggggcgggtcgggggggaagttgtctagcaagcaccttgttgtggggtttgggctttagatagacctggttgggctttagatagaccgggtttgggctttagatagacttggtttgggctttagatagacctggtttgggctttagatagacgtggttgtcccagctgtgaaattttgtgcaagataccaaatctctttgagctttttgaatttcctcatctataaggttgttgtgagaacttagtgagatcatgtatgaatagtaaatgagacgacgtatgtttagggccatgcaaagggacctgcgaagttcggtcttaatgtagctatcctgggcagttcaggttgtgacccaaaccttcagtcacccatgggggatgatggcaagcatcagccatctgaggctggagtgcagtggtacaatcacagctccctgcagccccaaccttctgggctccagtgaccctcctgcctcagcctccctggtagctgagactataggcgtgtgccacatttttaaaaaatactaaaggtaaggtcaccttttattgttttctagtactttaaatcactttcttagttgactaagctgacttaagtttaaaatcatgaatccacttggcctttgctaatacttcttttagcttgaccaatggagtcatgactgaccagagtattaaagcaaatcagctcttttcacatatattccaaatgtgggcacatactgacttggccagtgatcatcaagaggagttcggtgacgagcatgcggaataaccagtgggaagttgaagaaatcccaggcccctgcttggtcttgcttcagagctgctttgtaactggtgacagagcacgtcgccaccttctttcatggagggctgtcatgtttagattattgttgataaaccgttttgagattttgaaatatacaaagctgccagcttggaaagtaacagtcattgctatggacatgattggctttgggggcatcaagccctcccagttcgctgtgtctacccagaacattctgctccgagtcctgctgcagagcccaggaaatgctgacagcacctgtcaattttggcctcaccctatgagctcatttaaaatcacccaggatgctcattgtttggatgggtcaaatcttcaaaatcaaatggaaaaagaagcctcttgcgtaagataaaagataatgaggaaaacatttcacataaccaaagcattagaatgttaagtcacttcatattagacctttctactgtttcttcattgtttgtttctgttttttcccagtaataaattagagttctttttcctgtgtggagcctggttatgaaaccttgcataagactcttcatgtttctgggccttggctttcttatctgtgaaatgaagatggaggtcccttcctgcttttctgtggttctgtgtgtacacatccctaaagcttttagaatacaaatatccgctgatttgaaaaaacattaggagtcatttgagcttcccacagctggagaatcatccacgtacgatgtgattcttttaaacaagctctctcagtattgattttttcctttccccaagagctctgtaaaaatagtgttttcttgccagagacatcagggcctcagaactactgacttccttctatgaacatattatatggtttgtgtttggcttaggatctctttaacagaccatccagctccattgtgagaggctgactcagcagagccctccagaccgtccagctccactgtgaaaggctgactcagcagaaccctccagaccattcccactcttcgggattagaatgcccttccctgccagcccggggcaggctaggagctggtgctgcacccatctcctgcatgcacccttgggggatggcacactgcagcattgcctccttctgttcccaggactcaatgttgccaagtgccacgtagtccaagaatcccgccagtttgctataggtgtcttccagagcctgtcgttagggctcaggttgaagcaggtctgtcacttttgttcacagcttgttcagggaccacctcggtgctctcagcaatgttctctcccctgcgcctggctcctggcctgttccccacgtctccatcttaccctctggtccaccctagtgtttgccagagattctctttcccttccccttattgaaatcctgacataatcccaaaggttttaggagtgtaagattctacacgcatacctcttcaagtgttttattatggaaatttttgaatatattcaaaagtagaggaaacagtgtggtcagcctctatgtacctgtcactcagcttcacgatcttatttcatctgcacctcttcccggtaacttcatattattttgaagcaacatccccacgtgtcatatcatttctagttttctgtgttaaagaatcccaaactcctcccagttgactggagagaaaggtgtctgtgaattcccctccaggttgcatgtcacttagtccagccacctctctcatctcccaggctgccggtcagcttgggagtcggtgtccctccccgttctgctgcagtcccctgctgtggggcactcggcaggagaacaggatcctttacgagtgggtagcttagctgagaagggaaggctgtttcaggcaggtcggggacaaggcaggaaaaggaaagggtctgggtcacacctcactgtcgggtccgctgggcacactcgcatttgtcctgagtatcagtccctacagaacgaataagaaactccccaggacaaaagggcctgattcctgggataccaaagctgtgacctgacttccactccagcccctcccttccccagtaacaggcgacaccgttctcctgcgagggattcaacgcctcatcctttctccctttcagatgcagtggcagaacgtggagcacgttggtgaccagagcccctacgtcacctctgtcattctgcacatcaagcagaacgtccccatcatccgtgacaacctggcttccacacgcaagtacttcactcagttctgcgttaaatttgcaaagtaagtcctggggcgtgctcatctctgggttcttgttctttttaatagactttatgttttagaacagtttcaggttcacagccaaattaagcagcaagcacagagatttcccgtgtacctgacccccccaacatgcacagtcttcccattaccgacacctccccacacacaaagtggcacattcgttacagtggatgaacctgcatcaacacgtcattatcacccggactctgacgtcgcgctggacattccctcggtttggacaaatgtacagtgacgtgtggccgccatttcagtgtcatactcaactgggttgtttttaaaaccatacttcccaccagcatcctcacaatttgagtgtccccaccatccagctgcggtttgttctggtgcctgcagtactgattttaatttgtacacaaaagaagcataatcataaaactaaatctgctacttaaagtcataggcaacagtaacagcagtacaattgccagccacgtcaaggcaaacaaaaatgaatggggcctactgttgttttgaactgtgcaggcataagctctccttgcccaggattggataattaaaattctttttcagggatttcatatatgcattttgtttctctgactggcttaataaatgcctcttaagggtaggagccatcggttctgtttcttttgagccttcttgtcctccctccccctggtattttttaccatggctgctagaatttatctattcatacttggacacactcttggtccgaggaaggcactagaaattgggatgcacaagccagggagctccctggccaaggcaggtgagtgcaccctgagccgtgtgtcttcctgctgtgtcttgtgtgtggccatttctgccctgagttttgaagcgaggaaatagtttagttctttgccgatcaccatctggcttagcaccattttccgtgataccaggtggtggtgagggtcagtgtctcctctgaccagttatcaagcaagcattttggcagacttctcagggaagggcttcaggagggtcagcccaggccaagctactgtatttgggttgttcccatccaggccccagctggtgattcaggactccaagtttctgtcttcccccaatctctcccagtttccctgtacctcacaaatgaacccctcaggactaacaattatggagcggcttgtggtgtcagctttactttctagtttgtcaagaaaggatagagtggactctccagggaggcattaatgtttgcagatggcagatggaccaggaggtgaaattccctcactctctgggtgctcattagtgtgttagaaatgttgctgataaatcacatcgtgacgctccccataactgctggtagaagcagtgtctctgtaaaaatttactgtgactcaaaatctccagggtggctgctccggggtctcattgagcttacgttaaagtgaaggaggagtccgttgacttagccagtcccagcgtctcccagctcagtcatatgattgagcttacattaaagtgaaggaggagtctgttgacttagccagtcccggcgtctccctgctcagtcatatgattgagcttacattaaagcgaaggaggagtccgttgacttagccagtcccggcgtctcccagctcagtcatatgattgagcttacgttaaagtgaaggaggagtcggttgacttagccagtcccagcatctcccagcatcagcctcacattctctcagagcccttgagtttcattgctaagcccaggttgagtgcgctgggaattggatgccccccctcacatctgtaatcattcagcctgggatctaggaagtggttttctgttttcatccatggtgccttctcatcctgctaaaatcccgcttaacagaggtgggcttgtgaggagacccttccctggtcaagggcagcagccaccaccgccctgatggcccagagaagcccttggcagttacccagcacattgcttggttttttccccacaggacgtgtgtcaggtcctcatactccccccatcgccacctgtagactagtatagagagccagttcaggggcacagccaaaggtttttttttttttttttgatacagggtcccactctgttacccaggctggagtgcagtggtgcaaccacagctcactgcagcccccatctcctgggcttaggtgattctcccacctcagcctcctgaatagctgggattacaggcgctcgccacccggcctagctcatttttctattttttgtagagatgagattttgccatgttgcccaggctggtctcaaactcctgggctcaagcagtccacctgcctgggcctctcagagtgctgggattataggcatgagctgccatgcccagtccggagcatgttctaatgtgaagcaacttaggttacaaagcgctgtgtgcacagctgccattggtcatgagttcagtttcatgttgcttgtctggctctggtttccagcactgaggaattccttccaaatagccccttgtttactctccttcctgatcacaagccacctccagatccgatctccggactccagtttcctctccctcagcttcctttctaccccacccctgcaaaaccatagatgtttccttttacctcgtttgctgtcttaagcaatagcagcctttcctgttgagacatcaaaatccacagcctggttgaaactgcagttgaaccacaagcaacttccctcatccactgagctgatcctcctcccttcaatcaaggagataatgagacaaatctcataatagtggttgggaagataaaatgagaagtcacatattaacttcctggtaaagtgctgataccaagctgacattcaaaaagtggtaggtggctgggcgcggtggctcacgcctgtcatcccagcgctttgtggggccgaggcaagaggatcacttgaggccaggagttcgagaccagcctggccaacatggtgaaaccctatctctactaaaaatacaaaaattagctgggtatgctggtgcgtgcctgtagtcccagctactcaggaggctgaggcaccagaattgcttgaacccaggaggcagaggttgcagtgagccaagatggtgccactgtactccagcctgggtgacagagcgagactctgtctcaaaaaaaaaaaaaagtttatgatttactcaatgtgcattcacttgagcatctcctatgtctcagacccagagttaaatgttttggcctgataaacatggcccccatcttcgtttgccttaatagtcaggtgaagcaaaatagacatgtaagcaaatgagcataatgaactaggttagatgtgagggtggaggcctgcagactccatgtagagtatggcgaaggcagcagaagaaaggctttctagagacgccgttgaacaggatctgagaggtgcgtgtgtactgacccacaagccccttctaggaaaggcagtccaggcgagggagcagtgtaggcattaaatagcccccagaatcctgggatctgcaagtggctcagttgggttgaagcatagggaggccagggcttagcaggatgaggctggagacagagaatgaagaatcaaggaagcctggcccagtggctcacgcttgtaatcccagcacttccggagcccaagggaggaggactgcttgaagccaggagtttgagcccagcctgggcagcataacgaaatcctgcctctacaaaaaaattaaaaagtagccaggtgcggtgcctgtagcccttacatccagtctgattgggctagcttcgatcatattccctctcaggacaaacaacagtcaccaaaggaatgctgtgctctgacgagctgagaatagttagagttcactgggagtctaggatgggatccggttttcccgggcctgccagggcctcatgtaactaaacaaaaccaggacttcactcagaagaaaaataagataatgggcaacagtggagtccacttcgattcttcattaaaaaaggttttttcatggagatacgtggaaccttaaagtttttgcatttctttcctcaagagagaataagcctaatttgtcacttcttttttatccacagctccttcattcccaaattcatcacccacctcttcaagtgcaagccaattagcatggtgggagcagaacaggtgagatggacgtagtatcaggcatttgcctggcagcttttgttgtagatcaagcacatattcttctagtccagatctacttggcaggaataaaattgatgatgtcccctgtttggggacagtataatgactcacccggaaggtttcttaattcgttcttccatttatttttaaaaattttgtttgaacgcctactaagttctgggtgcagggtataacacagcaagcaccatggaaaggtccctgctcctagtgctcacactccaataagaagaagtggctgggccgggcacagcggctcacgctgtaaccccagcatttcgggaggcctgggcaggcagatcacctggggtaaggaatttgagagcagcctggccaacatggtgaaatcccatctctactaaaaatacaaaaattagctgggcatgggggcaggctactggggaggctgaggcaggagaatcacttgaacccgggaggtggaggttgcagtgagccgatatcacaccactgcactccagcctgggtgacaaagtgagactccatctcaaaaaaacaaacaaacaaaaaaactagcaaaaaacttggaatattggccgggcatggtggctcacgtctgtaatcctagcactttgggaggcccaggcaggcggatcatctgaggtcaggagttcgagaccagcctggctaacatggtgaaccctgtctctactaataatacaaaaaattagccgggcgtgatggtgggcgcctgtaatcccagctactcgggaggctgaggcagaattgcttcaacccaggaggtggaggttgcagtgagctgagatcacaccactgtactccagcctgggcaacaagagcgaaactccatctcaaaaaaaaaaaaaaaaaaaaaacaattagccaggcgtggtggtgcatgcctgtaatcccagctacttgggaggctgagacaggagaatcacttgcaggtggaggtggaggttgcagtgagctcagatcacgccactgctctccagcctgggcaacagagtgagactccatctcaaaaaaaaaaaaaaaaaaaaagaataaatcccagtgatgggaggctgagatgggaggatcactagaggccaggagttcaagaccagcctgggcaacatagtgcaaccctatctctcaaaaaaaataaaacattagctaaaaaacggtccacacctgtagtcccagctgctcaggaggaggctgaagtcggaggattctttgaatccaggctgaagtgagctatgatcgtgccgctgcactgaagcctgggcaacagagtaagacaccatctgccccacaaaaaaaaaaagagtcttttaatgattatagtaagctcagacccaaagccaatatcttcagaaaaatatcagttcatccagtgcttacatccattattgttattattttttaacaaacccacagccaacatcctatgtttacttccgttttgaggtgtggatgagaaaaccatctgctggaactggagttttacttaatcagaccccaggccagttcaggtgggcagtaggggagtgtggatcttgacaggcccagaatggggagggtgtgggtgggaactacagggcaacgtggcccctgaacgattctcacatgagttgaggtttggctgggcctgtacttgccctgatgtctgggccttgaaactcaagcagccatgtagctgcaggcgtgttcactcaggcagcagaaccatcagaatcaagttaactcagcagtgttcatagactgaaacagacgctgcctccagtagtggagcagctgccatccaaacttgaacaaaagctatggcattggaagctaagatttagcccaacctcagctgtgtctgccttgccacaagggtgccagatcctaaattaggttttgctttaatacttatgctgaaaatgggatgggagacatttttctgctctttgttctctgagtactatataaagtgagttctttatctttgggccccagagtcctcgagcaattgcaagggcacgtggaactgacccacaccaatattgatcatgcttcttgctagtttatgatcttcagatcatcctgttttgcagggtcactaattattcttatgactgcgttcacctatgaaagcttttctttcccttgagattaaggataagaggagaatgtccgctgtcaccatttctatcccacgttgttgttgaagtcctggctaggacaacaaggcaaaaaatacaatatttttaaaagaaacaaaatatatacagattagaaaggaggaaactaagctgtcatttttcatggaaaatatgattatgagtaataaatctaaaaggatctacagataaactgttagaatataaatttagcaggccgggtgcagtggcttacacccttaatcccaacactttgggaggccgaggcgggcggatcacaaggtcaagagttaaagaccagcctgaccaacacagtgaaacccccgtctctactaaaaatacaaaaattagctgggcaaggtgtggtgcgcctgtaatcccagctgctcgagaggctgaggcaggagaattgcttgaacctgggagaactgcttgaacctgggaggttgcagtgagctgagattgcgccactgcactccagcctgagtgatagagactccgtctcaaaaaaaaaaaaaaaaaaagaatataaatttagcaaggttgctggctataaggaaagtgttttaaaatatatttctatataccagcagcaaacaatttaaaaatgaacatttttgagtgaaatactttttttttttgctgtattgcccaggctggagtgagtacagtggcacaatcatagctcactgcagtctcaattcgtgggctcaagccatcctcctgcctcaacttctcaagtatctgggactacaggaatgtactaccatgcctggctggctctttttttttttttttggtagatatagggtctgcctccctgtgtctcccaggctggtctcaaactccaccctcctcagcctcccaaagtggtgcgattacaggcgtgagccatggctcccaggcctaaatgaaatcatttacaataacatcaggaaacattaaatacctaggagtaaattaaaaatgtacaagtcttctacacagaaaactgtacaatattaagacacagaatccataaagacctttaaaatgacaggatagctcatgttcattgataagaaagactcaaaaagaaatacatatggagtctttctgagcctgctctggctgaggaggctgcccaataaaaaataaataacaatttaaaaagcggcaaattattccaaaattaatctatagatagaattcaatcctaattactgtatcaatttatctatagatacagtagaatcccagcaggggtgtgtgtgtgtgtgtgtgtgtgtgagtgtgtgtgtgtgaattgatatgctgattttaaaagttagatgaaaatacagaagacaacagccaaaataatcttagaacagaattggaggagttaaagctcaggatatcaagacttattgcagcagtattgtaattagagcagtgtggcactggccccagggacaaagaggccaacagaacagatctgagctgagggatagacccacacatgtgtagatacttgatttatgaccaaagtggcatcattcaaagagagtcttttcagtaaatagtgctgggtaattggatatccatatcggaaaaaaatcttgacctttgccacacaccatatataaaaatcaattccaaagaggatttggtgaaattagaacactcatacattgctggtggtaatgcaaaacggtacagccattttggaaaacagtttggcatttacatagagttaccacagggcccagcaattatactcctagatatatacccaaatgaattgaaaaaggcagggtgcatggttcacacctgtaatcccagcactttgggaggctgaggcaggcagatcacctgaggtcaggagttcgagaccagcctggccaacatggtgaaaacccacttctactaaaaatacaaaaattagctgtacatggtggtgtgcacctgtaactccagctactcgggaagctgaggcaggagaatcacttgaacctgggaggcagagattgcagtgagccaagattgcgccactgtaccttcaggctgggtgacagggtgagactctgtctcaaaaaaaaaaaaaaaaaaaagaattgaaaaaaaaatgtgttcacacaaaagcttgtacacaaatattcatagcagcaccatttataatagccagaaagtagaaacaactcaaatgtccatcagctgatgataaacaaaatgtggtctatccatacaagggaatattactcagccattaaaaggaataaagtacccattcatgctacaacatggaagagccttgaaaccatgttaagtgaaagaagccagacacaaaaagccacctattgtgtgactctgcttctgtgaaatgtccagaacaggcaaatccgtaaaacagaaagtggattaatggttggcaaaggctgagggagggggagatgggaatggctgctaatgggtaagggtttctttctggggtgataatgtgttctgaaaccagataatgctgacagctgtacaaccttgtgaatagaccttaaaaaccactgaattgtacacttccaaaaggtaaattttatggtttttgaattatatctccatttttagaaaattaatcccagatggattatggctctaaaaaataaggcaataaagcttctggaagatttaatataagacaatatgtttatgaccttgggttaggcaaagatcccttaaacaaaacattaaaagcactaaccataaaagaaaagattggttattttgagtacttaaaagactttggccaagtgcgatggcttgtgcctgtaatcctagcactctgggaggctgtggcaggaagactgcttgagctcagcagtttgagatcagcctgggcaacacagcgagaccccatctctacaaaacaatttaaaaattagccaagtgtggcacgtgcctgtagtcctagccactcgggaagctgagacaggaggatcagttgagccaaggagttcaaggttgcagtgagctatgattgcaccactgcattccagcccaggtgacagagtaagaccctgtctctaatcataataataatttaaaagagtgatgataccaagtgttggtaaggatgtggagcatctggaactttcatatgtgctggtagaaatggaagttagcccagccacattggaaaactcctaggcagttagccaaacatatgcctaccccatgatccagcagttctactcttgagtagcttccaccctagagaaatgaggactttatgaccaccaaaggcatgcgcacgaatgttcacagcaggtttatgagcaggaaacaagctacagtgagagagagcaggagagacgaatgttcacagcaagtttatgaagcaggcaactagctacagtgagagagagtaggagagacgaatgttcagagcaggtttatgagcaggcaactagctacagtgagagacagcaggagagtttgttgagagggaaaggagagcattgactggacgagagcatgaggaaggcttcagggatgccagaagtgtgctctgtcttccgttaggcagcaggatgtgcacatgtctggatgttgatcaaatggcatacgtggtgtttgtgtactctgtgaaagttatacctaatttttttaaaaagaaaaagaaatagaacatgtgtccaccttgttccatccctcctgatagcctgagctgtctcccctgtgccacctcattgaagaattttctatggtgggaccaatatggttcacctatgtggttttgttcacatggttctttgtcttctaggagtgtgggcctgtatcttatttacgcaaaattttcatcactgttgatagtcatcatgtccccaagaattgtaggaggctcctcgggaagtaaagggcccctctcaaagatttccattgctgggtgatcagccttcacaggcatggcatactggccacccttgcacccccacatcccatcaacaacattagccagcccacactgccccagaaattatcgctgaggcagaaatgaatgtggcaatagccaccccttgcccaatgtctcatgcctaagaagatgaattatcaactatttcaaagttgaaaactagcagattttcatgataaatgggacctttctgtcttgtctttgcacagacagccgccaaatctgtcaggctcattcccgccttttctgactgccttgctttatgtataaaacctgagaccagggttttcacctctcagtgtctggtaaagacagaattttatggtgactggccagggaatgaaagtgtcatatctccctgtatatgagggacactagagaattatgcctggtgcattcaaacccttcctgtcatttaagactgtacaattatttatgcatataatgtatctctgggaagtagaaaagtaggaaatatctccatatgctttaaaatataatgactgattttttttttcctaccaacaaatgaatgctaagacatggctttgattttgacaaggctctcaaaatttgctacatggaagacagagttgagtcctgaatggtagtctttaaacaaaaattccagttaattaatgtacagaaaataatgtaaaaaacagtaactaactactcagctcagcaaaatatgtaacatgtttccacatttactttacatcttttttttttttttttttttttttgagaaaatgtctcaccgtgttgcccagtctggagtacaatggcgcgatctcggctcactgcaaccttcacctcccgagttcaagcaattctcctgcctcagcctcccgagtagctgggattacaggtgtgcaccaccatatctggctaatttttgtattttagtagagatggggtctcaccatgttggccaggctggtctcaaattcctgaccttaagtgatcctcccacctcagcctcccaaagttctgggattgcaggcatgagacaccgcgcctggcccattttttttttcttttcttaagagacagggtcccactctgtctcccaggctggggtgcaatggtgccatcatagctcactgcaacctggaattcctgggcttaagccatcttcccacctcagcctcctaagtagctgagactacaagtgtgtgccactgtgcctgtctaatcttattatttttgtttttgtagagacaaggtctcactgtgttgcccagggtaatcttgaattcgtagcctcaagtgatccttctgcctcagcctcccaaaatgctgggattacaggcatgagctgccacaccctgcctgctttagatcatttttatgtaaagtaaatcattacagttattgctgaagaccgcccccatgaaccccaccctgcccatctcttcctccatgccccaaagtaaacactgtcctgattttgattttattctcatatgtgttttgatatatgtgtatatattcacaaatgatatatgattttgttttgcatattttaaaactatataaatggcattagacatatcatttccccacttgcttttttttgcccaacttactattttctgagatttatgcatgttaatgcatgctgtgtgcacccattcattttcacctcagcagcatattccattgcacgaatgtgctgtcatttgtttattcattccactgtcaatggacgtgtaggttgtttccaaacttttgcttttataaatagcggatgcagggaacgtttttacatgggcaagaattcctctaatggatataagtattaatgctgtgttatgggtgatacacatctccagctaaggaaatgttgctaaatttcccccaacgtgcttgaactaacttctactgtcaccactagtctgaatttcagtgtggccgtgcccacactagattatcaacctgtttacttctgactctgatgggtgtattacggtgtacatttgtgaatttcagtgccatggccgtgcccacacttgattatcaaataatctgtttacttctgactctgatggatgtattatggtgtacatctgtggttttaatttgcatttcccagttactaaccaggttgcgtgtcatttcatatgcctttcgggcatttgagtttcctcttttgtgaatccggtgttagtattgtttgcctgttgttgtgtcgctgttgggatagtttgtgcttttcctgttgatgtgtaggaatcttcatgttcggaaccccgttcccttgtcaacgttgcacgtatcttctcctgatttatgtcttgtcttttactttgtttgtttcttctgatatagatgcctttcattttagggtaggtggttcattctttctgatgtttgacattcttctccacccataagcaatgaaaataatctctgtattttcttcttcttcttcttttttattttttattttttatgtatttatttttttgagacagtgtcttgttctgtcacccaggctgtagcgcaaacctcccaggttcaagcaattctcctgcctcagcctcccgagtagctgggattacaggcatgcgccaccacacccggctaatttttgtatttttagtagagatggggtttctccatgttggccaggctggtctcgaactcctgacctcagatgatccacccgcctcggcctcccaaaatgctgggattacaggcatgagccactgcgccctgtattttcttcttaaagtttttcttttttatatctaagaatttaatccacctagaatgctttagaggcttgttctgggttcctccgaggaaaagcagcagtcatttccactggaattctggaaagtgcgctaacgccaggctcttcacgtgggccttgagcaatcagtgccattccccctcctggaggtttgcatacccttttctctgagcccttggccttttcaacaaagcagacactaggatagtaagaatttctatctctagaaatccagaaaggtccaaaatgccctgcactttgctggctacagttgaatgacctgcgtggtgcaggcctttgactagctgcatgaaattgctctgaccttagtgtaattccttaccacacctaaattattccacataaaacactgacgtcttccccatgtttctaccattgttaaaattacaattgccataacccttaagttcatagtatctgtcgttacttagtttctctttaatcattaattcttctgtccaaagcaaagtaaataggaaattggaggatgcaaagtgtcgcagggcctgaagggtcccatttctcacctacctgataggattacagaaggctttcccaaagaagcaggcagtggcagagagtacaggccttgccctgaatataagtttggccgttatcaccggagttgagtggtggcattgggagctgtcaccccactgctgccgttgtctgcttggtgaccatgtggttccattctcctaagccatctcaacaggccagagtacacccttctgtcttcagccatttctctgctccctggttgccaagagcagcggcggcagcagagcagggcagtcagcaggagtcagtgtgagctcgtcaccaaaaccacccagggacatttacctgggcaaccggaaatggaattccagcttcccttccaccttttgtctaaccccgttacctgggcaaccggaaatggaattccagcttccagtccaccttttctctaaccccgttacctggcaaccggaaatgaattccagcttcccgtccaacttttgtctaaccccgtccgttgcatgagatgagtttggtgagctgttaatcctctggaactttttctcatctgtaaaatgggaacaataaataacatccagggtaggtaaggctttactcagattaaatgtgacaaaacgttcctcatgtcattcccggcagtcagtgagcctttaggactatgggtgtccttctagataattggcatcccagagaaccagaacaaacaaagaggaaaaggtagattgttgccaggatacaatgtttacatttgggtaaatctcctacatcctcagtaacatccagagaaattcaaagtaaaacaataatgagttactattttttgcctaatgaataatcaggatttgatgagttttcagtgctgataagggtgcagtctgcatggctggcagaggtgtaaatgggtccattccattggaaagatcttaaagtttacacaaccacacacatcacagagtactgcacagccattaaatcacgattcttctttagagatggggtctcgccatgaggcccaggctagagtgcacttaaaaaccttgatttgttttttaaagactgcaaagatgggaaaatagaatataaaaattgtgtatattaagtgagaaaaccaggttataaaattgaatatacatacagtatgattctgatttagttttatggaggagttgtggtttgttactgaggcagggtctccctctgtcacccaggctggagagttacagtggcacaatcttgagtcactgcagcctcaacctcccaggcttaagcgatccacccacctcagtcttcctcagtagctgggaccacagatgcgcacccccacgcctggctaatttttgcattttttgtagaggcggggttttgccatgttgcccaggctggtctcaaattcctgagctcaagcgatcctgctgcctggccctcctgaagtgctgggattacaggtgtgagccacggctcctggccccctgatttagttttttatatacgtacacataggctggctccttgatgttgtttctcctaggtgatgggaattatacataatttttttcttttatatttctgtttatttccccaattttttgcaacaagaatgtgttacgtgtataacgagaaaaacatgactcatcggcatgagtccactcggcactgggtcgctggaaggggccggtaatgctctctgctttgctccacagctgctgctggacacccactcgctgaagatggtcctgctcgatctcccctccatcagctcgcaggtggtgaggaaggcacccgccagctacaccaagatcgttgtcaaaggcatgacccgggctgagatgatcctcaaggtgatggcttgtgttaaaaggggccagttatttatttaatctctttttctgagaagccttggttttgaaagcacagggtaggtcctatcctcaccggcctcaaagcatggtccacattcttgggctggactggattttggcctcatcagatattgttgaaagtctgtggatagttattagggctcagtaattccttctgacaaatgaatttcttgttggcgtgggattctcttgtgatcaaatgtggtcaagcttggaggttaggtggttgccactgtgaatcagtgtatgtcagggatctccgcttctcagcaggaatttcaggcacagctctcagttactcccttccacatcagcctttttggctttctgtactctgccactttaaatgaactctgaacagatgttgtagtaactgaatctaatcagcaaatggatattttaaagccccatttaacaagactgtacttcgagtgaggaacgtctgaagccctgcgcatctgcctctggtttccagctattttgaagagtagggatgagggctggagaacagatggtcctgtggtgatgtggtcttaaaagcccaggacctgtaggctcttcaggccacttcctaaaccagatgactcagggacggcaggagtaggaagtggcagcagggcctcagacaccggtgggatgtgggtgaggatgaagcagctcatgtaggtaagggtgaagagctcatgtaggtgagggtgaagagctcatgtaggtgagggtgaagcagctcatgtaggtgagggtgaagcagctcatgtaggtgagggtgaagagctcatgtaggtgagggtgaagctgcctcatcatgttctttccctgctgcttactgctggggaggagagcctgtggtctgggaattatcggcagaggatgcctgagtgaactcctcctcgccactcttcccttcagtctcaggaattcaaaacaaatcagtcggctggggaaagaaaatcagatactgcattccagaacaaaacggaaatgaataagggttgcagtgccgttcctttcctttgtttgtatgttaattgatagtttaagttagtcgttacatgaagttacagattttaagtctccaaaaggtgaggcagctttggcatttttgtttttgcagaaatccacttacttataccagctccttttgccacccatttctcaggaatcatagtacgtcaaggcagaaggagcaagtaccgtgtactggtgaaatgcctggaacaggagaccctctcacgcagggtttcccggatggtcctgatagtttaaaagtcacctgggactccagccaggcctactgaattagagtctttagaggagggccccggaaacccatacttcaaacagcagcgcaggtgtatttaggattcagcaaatttaggacattgctgtagtggcatgtgaagatgagatgggccactggggcgtttctagtctgggttgctgctgcttaaggaaacctctcagaatccatttagcgctcggcgggcaagtgaggagtgagttttcctgaagggcccgctcccgtctcctcctgcggtgggtagtgagttttcttgagggcccgctcctgtctcctcccgtggtggtagttttcctgaggggcttgctcctgtctcctcccgctgtaggtagtgatggcccctcatgaaccgttggtggtgtttgttgacaactacatcaaacttctcacagactgcaacacagaaacctttcagaagatactggacatgaaggtttgtgccgggacatttggtccacacctgctcatccccctcacactcagcggttcttaaccgggaattgggatataagttccgggggggctttctcaaaatgcatgtgcctggctccacagagcaaaccggattcagagaagcctctggaggaggatggccccgggcacgtgcacttcaggattctgacaggccctgcatgccccgctgagaccacctgcacagggaggatggggcaggggcagggggatgaggacaggcatgttgtccttcccaccttcttgacctgtcctttctcctctgtcagccgcttctttcccttcctttaccttttcttcccctctcttttcctcccacgctactacccaggggatggtgagtcccttgaggaaacggttcatcctcagcctggagtaactatgctgtctccagagcctctgctgaccccatatccagatactgcgctgtcccccgtgggccattctggcccagacttcgtgacggttctgtttctctctcaacctcaggggctgaagaggagtgagcagagcagcatgctggaactcctgcgccagcggctccccgcaccgccctcgggggcagaaagctccggctcactgtccctgacggcgccaacaccagagcaagagtcgtcacgcatccgcaagctcgagaaactcattaaaaagagactgtagcagcagcaaggggccctttgctcctggctggagaccctcagcgcccgttccccagaagcccccaacctctcctgtgctccccggcactctcacatcgtcggtcttcaaacttcctgggacatgtgggttgttactgagtctctcccatgccctgtcttacttcctgccctaatcggagacgctgagtaagggctgggctctaagagggcgatttaggtgatctctggttcgtgaagcagaggcagcagtggaggataggtccctgagctgcccttgactcatgtagcctccccatggcagtcacaccctcttgacacgtgggccccacccgtcctttttttttttttttttttttttttttgagacagagtctcgctctgtcacccaggctggagtgcagtggcgtgatctcggctcactgcaacctccgcctcccaggttcaagcaattctcctgcctcagcctcctgagtatcggattacaggcgtgagccaccgagcccagccccttcctccatttctttactcccaccctgctcctggtttctagggaagggaaaccaggaagttcacttggaagacgtttcctaggttttctcatcagatgaagccatgggaacgcccaggaagtccatactctcaaacccctttctgcccactcaccttcaggtccacagcactttccagcgtcatctgaaatagcaaaggtgatgtgcagcatcccagtgatgtgttcctgtgttatgagaaggagtctggggttctggatgcctcaggaacagaatatggaccttaaagaccaggctgagagcctggcctggcacgcagcctgcccgccccccccgcccttcctgtccaccgcgggctctctgcagcagggcttgccgaagagactgctcccgacctctcatgtcatcctgcatccagagaatggcagcatatcaagccgttaaccctgattcactcggttcccttgaaaccaggcctcagttaaccatgaccacagctacaggcaaaccgctgctgttgctgcctgcttttgctgaagaatgatatcttgccaggcacggcggctcatgcctgtagtcgcaacactttgggagaccaaggcaggaggatcacttgagtccaggagtttgagaccagcctgggcaacatacagatgtctacaaaaataaaaatttgcaaggtgtggtggcatgcacctgtagtcccaactgctagggaggctgaggtgggcagattgcttgagctcaggagtttgagaccagtctgggcaacctggcaaaaccaaaaatacaaaaaattggctgggtgtggtggctcatgcctgtaatcacagcactttgggaggctgaggcaggtggatcacctgaggtcaggaattcgagaccagcctgcccaacatggcgaaaccctgtctcaactaaaaataaaaaaaattagccgggtgtcatggcgagtgcctgtaatcccagctactggggaggctgaggcaggagaatcacttaaacccgggaggtggaggctgcagtgagccaagatttcaccactgcactccagcctgggtgacagagcaagaccccttctcaaaaagttttcaggatagaggaaatttccttaaaatccataaaacttgtaacagccgtacagtaggaataaggtttggaaatctgcctggaaacctgatttcctcatccccaccttgtttcccaacataaccactgctctgtgcccctgccctctctgccaggctttctccccgatgccgtccagctctgatcctgagtgtcatttcttcatcggcttccaggctgtccttgctagctggtttgactctcacgcatcaagcgtctcaaatttgagaatgcggaggagaaaagaagtgttgcgagaaggagatgcggccttcagttgaggtctattaggaaaagattccaaataagacaagggcggggggcggcagtcgggagagcccccaggaagccctgtagatgcccccaccccagcccatggagttgctatggttaagcagcctgagccgtacagttgaaaaggggcggtggggcccatctccaaatagcacagccagttcagccgtctgtcctcaacccaggagagctgggaaagccagtggactcctgcacctggttcttgtcactcctggcgtttgtgtacagatcaccacttctctttttggttcattgttgaggagtcgttttccggacggctccatcacagcattgagctatcaagctgctgttttccacagttggtggtcacagccagggaagttgctgtcttgatttgttacattgtcagtaatccccaaggaaccaatggatgtcagtaggagtttctgttaaatgtctccttgatggggactcagtactgtgtagagacgctgtgtttctcttctgggggtgtgcatcagaaccactggggccttttaaaatctacagatgccggccgggcgccgtggctcacgcctggaatcccagcacttggggaggctgaggcgggcggatcacaagcgcaggaaattgagaccatccttgccaatatggtgaaaccccatctctacaaaaaatacaaaaattaccggggtgtggtggcgtgcacacctcccagctacttgggaggctgaggcaggagaatcgcttgaacccgggaggcaaagattgcagtgagccgagatcacgccactgcactccagcctggcgacagagtgagactctatctcaaaacaaacaaaaaaacagatgcccggagattttgagtcagtaagtttggatggggcctggcatacaggtttaaaagttccataggtagttataacgtttacaccttgttaagaaccactgcaacagagagatttgctttatggaagggctcctgccacgcattttcatacatgtctatttttctgactctaagctaaaagtgcgccgacactacacttgagctggtgccaacgtggtgaagattctctactgataacagctttcattttaaacttgtgttgggtcaggcgcggtggctcacgcctgtaatcccagcactttgggaggccgaggtgggcggatcacatgaggtcacgagtttgagaccagcctggccaacatggcaaaatcccatctctactaaaaatacaaaaaaaaaaaaaaaaaaagcaggcaggtggcgggtgcctgtaatcccagctacttgggaggctgaggcaggggaatcagttgaatccgggaggcggaggttgcagtgagccgaggtcccgccactgcactccagcctgggagacagagtgagactcagttaaaaaaaaaagacttttggtggtggtggggaccatgcccaggattgggctctctccatactgatgaggattcttcttgttttgatgaccaacccccaagcagaagctttatttattaacatcacttcaaaaataacgtatcaaaggggcaccctaggccgggtactgtggcatcacacctgtaatgccagtgctttgagaggctgaggtgggaagattgcttgagcccaggacttcaagacaagcctgggcaacagagtgagaccccatctctattaaaaaataggccgggcatggtggctcacactggtaatcccagcactttgggaggccgaggcaggtggatcatgtgaggtcaggagttcgagaccagcctggccgacatggtgaaaccctgtctttactaaaaatacaaaattagccaggcgtggtggtgggcgcctgtaatcccagctactcaggaggctgaagcaggaggatcgcttgaacccaggaggcagaggctgcagtgagccgagatcatgccattgcactcctgcctgggtgacggagcaagactctctaaaaaataataaggtaaaaggagtacctgtggatgaaagcagcagctaacagctctgtgattcagctagacctagatattgtgcccattccttcccctcagtccattttctgtagcccctttaaaaaccaaaaaacaactttgaagtcactttgggtttaaaataaatagtggtaatttgtataatcaataaagagttcactctgctcttactgaggggacttgtctgaaagctggcttagcggtgtccaggccagagaacatcctgtgtggactcttaacaatgaaacaggagccgcaatggacaaggtgttctgatctccaaacccagctcagggattgaagctaactaccgccactccttcctctctcgaagaacaaagagccagtacccagggctctgcccacccccgagaaggggtgcctgatttcttatgtctagggtggctcctctgtgcagatcagacaggactgagagcagacaagctgagaccagcatgaccagtacagggcacgcagagcgtgggggcaggtccgaggctgctgctcgatgcagggtatgacaccaacccttcctgaattgccatcggatgaggagacctggttccctgttgaaagaatgccaggggaaatgctgcatgtgcacagctggaaatggggttccttctctaggaagagcactcggaataacctgctggaaatggggttccttccctaggaagagcactcagaataacctgctggaaatgggattccttggctaggaagagcactcagaataacctgctggaaatgggattccttggctaggaagagcactcagaataacctgctggaaatgggattccttacctaggaagagcactcggaataacctgctggaaatgggattccttacctaggaagagcactcggaataacctgctggaaatggggttccttccctaggaagagcactcggaataacctgctggaaatggggttccttccctaggaagagcactcggaataacctgctggaaatggggttccttcgctaggaagagcactcggaataacctgctggaaatgggattccttcgctaggaagagcactcggaataacctgctggaaatgggattccttcgctaggaagagcactcggaataacctgctggaaatgagattccttccctaggaagagcactcggaataacctgctggaaatgggattccttcgctaggaagagcactcggaataacctgctggaaatgagattccttcgctaggaagagcactcggaataacctgctggaaatgggattccttcgctaggaagagcactcggaataacctgctggaaatgagattccttcgctaggaagagcactcggaataacctgctggaaatgggattccttcgctaggaagagcactcggaataacctgctggaaatgggattccttcgctaggaagagcactcggaataacctgctggaaatgggattccttccctaggaagagcactcggaataacctgctggaaatgagattccttccctaggaagagcactcggaataacctgctggaaatgggattccttcgctaggaagagcactcggaataacctgctggaaatgggattccttcgctaggaagagcactcagaacaacctgcctgcttgagggtgacagcaagtgtctcacacttctcgtctactccaagtcagattcctaaaaataaaatagagctccaatgggcaatttaagcaaaagccttagaaacatggacacctgaaatgctggcctacatgaagggtacgatgacattttatatattaaataaaaattcccagtcctgttttagtattcatcagaatagcctcttggaccctcgaagttctacacctttgggagatataaatttccttaaaataaagggattgcttctttgtgtaaatagctttcattttctccatctggaagtgatttctgcctgcatgttggagcacaaaatactgcagttaattaaagcattactggatgtcatttgctagaatgtatttccttactgctgacagaaaacagaacagactctaggaaagaagtagcaagtccgtgaccctggccgctcctggtggctgcccttctcccttccctgacagtctaaggaagcaacgcgtgggagcagaatgtggccgactgagcccagtcctgacctgcccagttgcagtggagcctgtctgtaatgttgtgtaaagtgttttgcttctgacttggaaccctacttgccctgtgaatttctatcctgtgaaccttcccttctctgtccttaccgttcccatcacagcctgctcttccagtgacggccaagtgatttctctcctgcacgcatgagtccatcctgtttccttagtagctggatggacgttttgccatgaaaactctttgggaagtcttgtgtcctttagtgatttctctcctgcacgcatgagtccatcctgtttccttagtagctggttggacgtttttgccatgaaaactcttcgggaagtcctgtgtcctttcaacaggggaaaactggctgcggcccttccattaggctccaggatcattacctcgtttccattctttcttttcaacagctccccactttactagggaagccaagggatcaacctaatgagaaaagaaccttccctgtagcccacctggaagggcattgcctgccagctccttccttctcacctatgtgaacaggagggaagatgccggcgatccatggatctgtgggacatgaaggacgtgtccatcagaaatgaaagcagcctgggattggaagcatccacagaagacttgatctgcaggtcttgatttggacctggcactttgacaccaggcgagtcactgatcccctgagcatccattttcaatattggtgagaggggattataatgaatattggctgtgaaggtcacacaagaccgggctatatgcacttgctctgccataaggcagtgtgaagtgtgttcgtgatcacttgtgggcgggagcctgtggctgtcttgcctggactggcttttttaaacatggatgagtggtgacaaatcctgcggccgtgtgcaggctacatccgcagcgagctccgcatatctggtctttgcctttttaggtcatgactgtaatatcaagcttacacgagagttttaaaagactgagcagtatccccttcccctggcagctgctgcttccgtagcatttagggataaacctgcagacactgagaagagagcttcctccctcctggggctggtggcgaggctgcctgttgtggaaaatagggcatgtctcctgtgaatgcgaattgcgagggttgccaaagcctcccttccaagaaacttgcttaggtgtctggtgtccacagaccagactcttctcccgacagggacaaaaattcttgcctgcctttctttttcttttttttccttttacttattcttgccttttttcttcttcttcttctttaggtatgatgccccccaaaaaactaagcaagattaacttgggacaggcagttctaactgggaagcctgagctcacaggctgtttggattactttccaattgtgtttcaaagatgtttagacttttcccaaggccagctgaatccttataatcagcccaaaagttcctttctgtttctgtctgtcccctttgagggtgttgactcagagaacctggggcaatatgagatgttaaaataaaaatagcgtccaacgtcccgcctcctgggaatgctgctcacttcatccgagggttctgggagcttctgctcagtcatcaaatggaatttgcacaattgtcttgcctcctgttttgggtaatttttcaacaagtgagaaattaagaacagcttctcaacaaacttccctctacttccagggccaagaaaagtatttgcagtgtgggctgcagctttcaggggtctcaggtgaaatggtggcaagaaaccccagctcccttcatgtgtttgccttgcgctgatggaaaaggaaggcacttctcagctgccagagaccacattccacagggttcttcacaaaatcaagcactgcagtggaccaactggagcagccactggagggctttagaaggcaaatggaatacatatcaaatgctatataaagaaaacatctgtttacacagagtcccccacagcctcatacctacacccaatatcaaatgctgtataaagaaacatcagtttacacacagagccccccacaacctcatacccacaccgaatatcaaatgctatacaaagaaacatcagtttacacacagagtcccccacagcctcatacccatgcctgtcacatctttgcacagccctaaaggatccagagctttggatcagcagctggctagctcggaggccagaggagggtgctgaggggagtggaggtcagttggggtagccctgggccctggctgcacagtccagctgctgtgtggcctgcatgtggtatcttaggtcatgagagggcctgggcaattcagtgctatctgtacatgttggtggggtgggaaggaaaaggtaactgtgtatttactgtgtcctggatacattatctcatcggatgaaattcctgctaagttaagctccgtttagtggacgggacttggaggctcaaagagggtaagtgacaggcccaaggatatgtgcctagtgaggggtgagccaggattcgatgtgtgactagtaaggggtcagccaggattcaatatgtgactagtaaggggtcagccaggatttcatatgggactagtaaggggtcggccaggatttgatacgtgactagcaaggggacaagccaggatttgatatgtgactagtgaggggcgagccaggattcgatatgtgactagtaaggggtcagccaagatttgatatgtgactagtgaggggcgagacaggatttgatatgtgactagtgaggggcgagccaggatttgatatgtgactggtgaggggcgagccaggatttgatatgtgactggtgaggggcgagccaggatttgatatgtgactggtgaggggcgagccaggatttgatatgtgactggtgaggggcgagccaggatttgatatgtgactggtgaggggcgagccaggatttgatatgtgactggtgaggggcgagccaggatttgatatgtgactggtgaggggcgagccaggatttgatatgtgactggtgaggggcgagccaggatttgatatgtgactggtgaggggcgagccaggatttgatatgtgactggtgaggggcgagccaggatttgatatgtgactggtgaggggcgagccaggatttgatatgtgactggtgaggggtggagccagtcaggatttgatatgtggttagtgaggggttagccagtcaggatttgatatgtggctagtgaggggcgagccaggatttgatatgtgactagtaagggggtgagccaggattcaatacgtgacaagtgaggggtgagccaggattcaatacgtgaccagtgaggggcgagccaggattcgatacgtgaccagtgaggggcgagccaggatgcgatacgtgaccagtgaggggcgagccaggattccatacgtgactagtgaggggtgagccaggattcgatatgtgagtagtgaggagtgagccaggatttgatatgtggctactgaggggcgagccaggatttgatatgtgactagtaaggggtcagccaggatttgatacgtgactagtcagggggtcagccaggattcgatacgtgactagtaaggggtcagccaggatttgatatgtgactagtgaggggtgagccaggatttgacatgtgactagtgaggggtgagccaggattcaatatgtgactagtgaggggtgagccaggattcgatatgtacctagtgaggggtcagccaggatttgatatgtggctagtaaggggtgagccagccaggatttgatatgtgactagtgacgagtgagccaggatttgatatgtgactagtaagggggtgaggcaggatttgatatgtgactagtaagggggtgaggcaggatttgatatgtgactggtgaggggtgagacaggatttgatatgtgactagtgaggggtgagccaggatttgctatgtgactagtaagggggcgagccaggatttggctccagccttcattccaacatccatgccttttgtacttcaccagcagttttcaaatttatgggacaaaattttacattggattccctctatacaaaatagataaaagtattttatgaatacattttatgagttcaaatatttttcagaagaaatcagtaaaagcattgaaaactattccagcaaataggaagcactttaaaccaaggttatggatgaaaatgtgtgtgtatcaaccccagtttacttctgggttgcacagaatagagaaatcttgatttaatccagctaagaattttcaaatagtatccattttgttttgttttaaacagctcttcttgcaatggtagaggctcttcaattaaacagagatggtaacaggc
